(19) United States
(12) Patent Application Publication
(10) Pub. No.: US 2007/0020651 A1
(43) Pub. Date: Jan. 25, 2007

(54) Compositions and methods for the inference of pigmentation traits

(75) Inventor: Tony N. Frudakis, Bradenton, FL (US)

Correspondence Address: Lisa A. Haile, J.D., Ph.D.;DLA PIPER RUDNICK GRAY CARY US LLP, Suite 1100, 4365 Executive Drive, San Diego, CA, 92121-2133, US

(73) Assignee: DNAPrint genomics, Inc.

(21) Appl. No.: 11/397,454

(22) Filed: Apr. 3, 2006

Related U.S. Application Data
(63) Continuation of application No. 10/156,995, filed on May 28, 2002, now abandoned.
(60) Provisional application No. 60/293,560, filed on May 25, 2001.
(60) Provisional application No. 60/300,187, filed on Jun. 21, 2001.
(60) Provisional application No. 60/310,781, filed on Aug. 7, 2001.
(60) Provisional application No. 60/323,662, filed on Sep. 17, 2001.
(60) Provisional application No. 60/344,418, filed on Oct. 26, 2001.
(60) Provisional application No. 60/334,674, filed on Nov. 15, 2001.
(60) Provisional application No. 60/346,303, filed on Jan. 2, 2002.

(51) Int. Cl. C12Q 1/68

(52) U.S. Cl. 435/6

(57) ABSTRACT

The invention relates to methods for inferring a genetic pigmentation trait of a human subject from a nucleic acid sample or a polypeptide sample of the subject, and compositions for practicing such methods. The methods of the invention are based, in part, on the identification of single nucleotide polymorphisms (SNPs) that, alone or in combination, allow an inference to be drawn as to a genetic pigmentation trait such as hair shade, hair color, eye shade, or eye color, and further allow an inference to be drawn as to race. A method of the invention can be performed, for example, by identifying in a nucleic acid sample at least one pigmentation-related haplotype allele of at least one pigmentation gene, and preferably a combination of pigmentation-related haplotypes alleles.

[0001] This application is a continuation of U.S. application Ser. No. 10/156,995, filed May 28, 2002 which claims the benefit under 35 USC § 119(e) of U.S. Application Ser. Nos. 60/293,560 filed May 25, 2001, 60/300,187 filed Jun. 21, 2001, 60/310,781 filed Aug. 7, 2001, 60/323,662 filed Sep. 17, 2001, 60/344,418 filed Oct. 26, 2001, 60/334,674 filed Nov. 15, 2001 and 60/346,303 filed Jan. 2, 2002. This disclosure of the prior applications is considered part of and is incorporated by reference in the disclosure of this application.

[0002] The sequence listing contained in the 926 kb file entitled “DNA1140-9.ST25.txt” on the compact disk and identical copies thereof, which were created on Mar. 31, 2206 and which are submitted herewith, are hereby incorporated by reference in its entirety.

### BACKGROUND OF THE INVENTION

[0003] 1. Field of the Invention

[0004] The invention relates generally to methods for inferring a genetic pigmentation trait or race of an individual, and more specifically to methods of detecting single nucleotide polymorphisms and combinations thereof in a nucleic acid sample that provide an inference as to hair color or shade or to eye color or shade, or to race.

[0005] 2. Background of the Invention

[0006] Biotechnology has revolutionized the field of forensics. More specifically, the identification of polymorphic regions in human genomic DNA has provided a means to distinguish individuals based on the occurrence of a particular nucleotide at each of several positions in the genomic DNA that are known to contain polymorphisms. As such, analysis of DNA from an individual allows a genetic fingerprint or “bar code” to be constructed that, with the possible exception of identical twins, essentially is unique to one particular individual in the entire human population.

[0007] In combination with DNA amplification methods, which allow a large amount of DNA to be prepared from a sample as small as a spot of blood or semen or a hair follicle, DNA analysis has become a routine tool in criminal cases as evidence that can free or, in some cases, convict a suspect. Indeed, criminal courts, which do not yet allow the results of a lie detector test into evidence, admit DNA evidence into trial. In addition, DNA extracted from evidence that, in some cases, has been preserved for years after the crime was committed, has resulted in the convictions of many people being overturned.

[0008] Although DNA fingerprint analysis has greatly advanced the field of forensics, and has resulted in freedom of people, who, in some cases, were erroneously imprisoned for years, current DNA analysis methods are limited. In particular, DNA fingerprinting analysis only provides confirmatory evidence that a particular person is, or is not, the person from which the sample was derived. For example, while DNA in a semen sample can be used to obtain a specific “bar code”, it provides no information about the person that left the sample. Instead, the bar code can only be compared to the bar code of a suspect in the crime. If the bar codes match, then it can reasonably be concluded that the person likely is the source of the semen. However, if there is not a match, the investigation must continue.

[0009] An effort has begun to accumulate a database of bar codes, particularly of convicted criminals. Such a database allows prospective use of a bar code obtained from a biological sample left at a crime scene; i.e., the bar code of the sample can be compared, using computerized methods, to the bar codes in the database and, where the sample is that of a person whose bar code is in the database, a match can be obtained, thus identifying the person as the likely source of the sample from the crime scene. While the availability of such a database provides a significant advance in forensic analysis, the potential of DNA analysis is still limited by the requirement that the database must include information relating to the person who left the biological sample at the crime scene, and it likely will be a long time, if ever, that such a database will provide information of an entire population. Thus, there is a need for methods that can provide prospective information about a subject from a nucleic acid sample of the subject. The invention satisfies this need, and provides additional advantages.

### SUMMARY OF THE INVENTION

[0010] The present invention relates to methods for inferring a genetic pigmentation trait of a human subject from a nucleic acid sample or a polypeptide sample of the subject, and compositions for practicing such methods. The methods of the invention are based, in part, on the identification of single nucleotide polymorphisms (SNPs) that, alone or in combination, allow an inference to be drawn as to a genetic pigmentation trait such as hair shade, hair color, eye shade, or eye color, and further allow an inference to be drawn as to race. As such, the compositions and methods of the invention are useful, for example, as forensic tools for obtaining information relating to physical characteristics of a potential crime victim or a perpetrator of a crime from a nucleic acid sample present at a crime scene, and as tools to assist in breeding domesticated animals, livestock, and the like to contain a pigmentation trait as desired.

[0011] A method of the invention can be performed, for example, by identifying in a nucleic acid sample at least one pigmentation-related haplotype allele of at least one pigmentation gene, wherein the pigmentation gene is oculocutaneous albinism II (OCA2), agouti signaling protein (ASIP), tyrosinase-related protein 1 (TYRP1), tyrosinase (TYR), adaptor-related protein complex 3, beta 1 subunit (AP3B1) (also known as adaptin B1 protein (ADP1)), adaptin 3 D subunit 1 (AP3D1), dopachrome tautomerase (DCT), silver homolog (SILV), AIM-1 protein (LOC51151), proopiomelanocortin (POMC), ocular albinism 1 (OA1), microphthalmia-associated transcription factor (MITF), myosin VA (MYO5A), RAB27A, coagulation factor II (thrombin) receptor-like 1 (F2RL1), or Adaptin 3 D subunit 1 (AP3D1) whereby the haplotype allele is associated with the pigmentation trait, thereby inferring the genetic pigmentation trait of the subject. In one embodiment, the pigmentation gene includes at least one of OCA2, ASIP, TYRP1, TYR, SILV AP3B1, AP3D1, AP3D1, or DCT, and the pigmentation-related haplotype allele is a penetrant pigmentation-related haplotype allele, which allows an inference to be drawn as to a pigmentation trait of a subject from which the nucleic acid sample was obtained. For example, where the genetic pigmentation trait is eye shade, a pigmentation-related haplotype allele can be identified in at least one of the OCA2, TYRP1, or DCT gene.

[0012] A genetic pigmentation trait that can be inferred according to a method of the invention can be hair color, hair shade, eye color, or eye shade, or can be race. A pigmentation-related haplotype allele includes specific nucleotide occurrences of two or more SNPs in a sequence of a pigmentation gene, particularly specific nucleotide occurrences of SNPs, which can be present and the same or different in one or both alleles of the pigmentation gene. A penetrant pigmentation-related haplotype allele is one that, by itself, allows an inference to be drawn that a genetic pigmentation trait of a human subject is more likely than random. A latent pigmentation-related haplotype allele is one that, in the context of one or more penetrant, or other latent haplotypes, allows a stronger inference to be drawn than the inference due to the penetrant or other latent haplotype allele(s), alone.

[0013] A sample useful for practicing a method of the invention can be any biological sample of a subject that contains nucleic acid molecules, including portions of the gene sequences to be examined, or corresponding encoded polypeptides, depending on the particular method. As such, the sample can be a cell, tissue or organ sample, or can be a sample of a biological fluid such as semen, saliva, blood, and the like. A nucleic acid sample useful for practicing a method of the invention will depend, in part, on whether the SNPs of the haplotype to be identified are in coding regions or in non-coding regions. Thus, where at least one of the SNPs to be identified is in a non-coding region, the nucleic acid sample generally is a deoxyribonucleic acid (DNA) sample, particularly genomic DNA or an amplification product thereof. However, where heteronuclear ribonucleic acid (RNA), which includes unspliced mRNA precursor RNA molecules, is available, a cDNA or amplification product thereof can be used. Where the each of the SNPs of the haplotype is present in a coding region of the pigmentation gene(s), the nucleic acid sample can be DNA or RNA, or products derived therefrom, for example, amplification products. Furthermore, while the methods of the invention generally are exemplified with respect to a nucleic acid sample, it will be recognized that particular haplotype alleles can be in coding regions of a gene and can result in polypeptides containing different amino acids at the positions corresponding to the SNPs due to non-degenerate codon changes. As such, in another aspect, the methods of the invention can be practiced using a sample containing polypeptides of the subject.

[0014] As disclosed herein, the identification of at least one penetrant pigmentation-related haplotype allele of at least one pigmentation gene allows an inference to be drawn as to a genetic pigmentation trait of a human subject. An inference drawn according to a method of the invention can be strengthened by identifying a second, third, fourth or more penetrant pigmentation related haplotype alleles and/or one or more latent pigmentation related haplotype alleles in the same pigmentation gene or in one or more other pigmentation genes. Accordingly, in another embodiment, a method of the invention can further include identifying in the nucleic acid sample at least a second penetrant pigmentation related haplotype allele of the first pigmentation gene and/or at least one penetrant pigmentation-related haplotype allele of at least a second pigmentation gene, for example, of an OCA2, ASIP, TYRP1, TYR, AP3B1, AP3D1, DCT, SILV, LOC51151, AIM1, POMC, OA1, MITF, MYO5A, RAB27A, F2RL1, AP3D1, or melanocortin-1 receptor (MC1R) gene.

[0015] By way of example, a method of the invention allows an inference to be drawn that a nucleic acid sample is that of a human Caucasian having a particular eye color or eye shade. In one aspect, a method of inferring that a sample is that of a Caucasian having a particular eye color or eye shade is performed by identifying a penetrant pigmentation-related haplotype allele, including at least one of a) nucleotides of the DCT gene corresponding to a DCT-A haplotype, which includes nucleotide 27585 of SEQ ID NO:226 [702], nucleotide 8298 of SEQ ID NO:226 [650], and nucleotide 32086 of SEQ ID NO:226 [marker 675]; b) nucleotides of the MC1R gene corresponding to a melanocortin-1 receptor (MC1R)-A haplotype, which includes nucleotide 915 of SEQ ID NO:228 [[ ]] [217438] [[,]], nucleotide 1092 of SEQ ID NO:228 [217439], and nucleotide 1119 of SEQ ID NO:228 [217441]; c) nucleotides of the OCA2 gene, corresponding to an OCA2-A haplotype, which includes nucleotide 132483 of SEQ ID NO:225 [217458], nucleotide 141832 of SEQ ID NO:225 [886894], nucleotide 114220 of SEQ ID NO:225 [marker 886895], and nucleotide 114307 of SEQ ID NO:225 [marker 886896]; d) nucleotides of the OCA2 gene, corresponding to an OCA2-B haplotype, which includes nucleotide 84355 of SEQ ID NO:225 [marker 217452]], nucleotide 418566 of SEQ ID NO:225 [marker 712052], and nucleotide 113047 of SEQ ID NO:225 [marker 886994]; e) nucleotides of the OCA2 gene, corresponding to an OCA2-C haplotype, which includes nucleotide 75403 of SEQ ID NO:225 [712057], nucleotide 144364 of SEQ ID NO:225 [712058], nucleotide 210654 of SEQ ID NO:225 [712060], and nucleotide 147364 of SEQ ID NO:225, [712064]; f) nucleotides of the OCA2 gene, corresponding to an OCA2-D haplotype, which includes nucleotide 193050 of SEQ ID NO:225, [712054], nucleotide 67333 of SEQ ID NO:225, [712056], and nucleotide 147516 of SEQ ID NO:225, [886892]; g) nucleotides of the OCA2 gene, corresponding to an OCA2-E haplotype, which includes nucleotide 108632 of SEQ ID NO:225, [217455], nucleotide 108680 of SEQ ID NO:225, [712061], and nucleotide 147516 of SEQ ID NO:225, [886892]; h) nucleotides of the TYRP1 gene corresponding to a TYRP1-B haplotype which includes nucleotide 11359 of SEQ ID NO:227, [886938], or nucleotide 14903 of SEQ ID NO:227; [886943], or any combination of the above listed penetrant haplotypes. For example, the pigmentation-related haplotype allele of MC1R-A can be CCC; the pigmentation-related haplotype allele of OCA2-A can be TTA, CCAG, or TTAG; the pigmentation-related haplotype allele of OCA2-B can be CAA, CGA, CAC, or CGC; the pigmentation-related haplotype allele of OCA2-C can be GGAA, TGAA, or TAAA; the pigmentation-related haplotype allele of OCA2-D can be AGG or GGG; the pigmentation-related haplotype allele of OCA2-E can be GCA; the pigmentation-related haplotype allele of TYRP1-B can be TC; and the pigmentation-related haplotype allele of DCT-A can be CTG or GTG.

[0016] An inference that a nucleic acid sample is that of a human Caucasian having a particular eye color or eye shade can be strengthened by further identifying in the nucleic acid sample at least one nucleotide occurrence of a latent pigmentation-related SNP of a pigmentation gene, wherein the latent pigmentation-related SNP is nucleotide 880 of SEQ ID NO:229 [marker 560], nucleotide 429 of SEQ ID NO:227 [marker 552], nucleotide 1381 of SEQ ID NO:227 [marker 559], nucleotide 3037 of SEQ ID NO:227 [marker 468], nucleotide 2543 of SEQ ID NO:226 [marker 657], nucleotide 11764 of SEQ ID NO:226 [marker 674], nucleotide 29117 of SEQ ID NO:226 [marker 632], nucleotide 4269 of SEQ ID NO:226 [marker 701], nucleotide 27427 of SEQ ID NO:226 [marker 710]; nucleotide 114086 of SEQ ID NO:225 [marker 217456], nucleotide 11799 of SEQ ID NO:230 [marker 656], nucleotide 8481 of SEQ ID NO:230, nucleotide 8699 of SEQ ID NO:230 [marker 637], nucleotide 106523 of SEQ ID NO:231 [marker 278], nucleotide 107830 of SEQ ID NO:231 [marker 386], nucleotide 118064 of SEQ ID NO:231 [marker 217480], nucleotide 50575 of SEQ ID NO:231 [[41]] [marker 951497], nucleotide 1080 of SEQ ID NO:231 [[42]] [marker 217468], nucleotide 107348 of SEQ ID NO:231 [[43]] [marker 217473], nucleotide 15939 of SEQ ID NO:227 [[ ]] [marker 217485], nucleotide 16220 of SEQ ID NO:227 [marker 217486], nucleotide 1084 of SEQ ID NO:227 [marker 869787], nucleotide 224 of SEQ ID NO:227 [marker 869745], nucleotide 4998 of SEQ ID NO:227 [marker 886933], nucleotide 5463 of SEQ ID NO:227 [marker 886937], or nucleotide 14820 of SEQ ID NO:227; [886942], or a combination of the above listed pigmentation-related SNPs. Similarly, the inference can be strengthened by further identifying in the nucleic acid sample at least one latent pigmentation-related haplotype allele of a pigmentation gene, wherein the latent pigmentation-related haplotype allele includes a) nucleotides of the ASIP gene corresponding to an ASIP-A haplotype, which include nucleotide 429 of SEQ ID NO:227 [marker 552], and nucleotide 3037 of SEQ ID NO:3037 [marker 468]; b) nucleotides of the DCT gene corresponding to a DCT-B haplotype, which include nucleotide 27427 of SEQ ID NO:226 [marker 710], and nucleotide 2543 of SEQ ID NO:226 [marker 657]; c) nucleotides of the SILV gene corresponding to a SILV-A haplotype, which includes nucleotide 11799 of SEQ ID NO:230 [marker 656], and nucleotide 8481 of SEQ ID NO:230 [marker 662]; d) nucleotides of the TYR gene corresponding to a TYR-A haplotype, which includes nucleotide 106523 of SEQ ID NO:231 [marker 278], and nucleotide 107830 of SEQ ID NO:231 [marker 386]; e) nucleotides of the TYRP1 gene corresponding to a TYRP1-A haplotype, which include nucleotide 15939 of SEQ ID NO:227 [[ ]] [marker 217485], nucleotide 4998 of SEQ ID NO:227 [marker 886933], or nucleotide 5463 of SEQ ID NO:227 [marker 886937], or any combination of the above listed latent pigmentation-related haplotypes. For example, the latent pigmentation-related haplotype allele of ASIP-A can be GT, AT; the latent pigmentation-related haplotype allele of DCT-B can be TA, TG; the latent pigmentation-related haplotype allele of SILV-A can be TC, TT; or CC the latent pigmentation-related haplotype allele of TYR-A can be GA, AA, or GG; and the latent pigmentation-related haplotype allele of TYRP1-A can be GTG, TTG, or GTT.

[0017] A method of identifying a pigmentation related SNP, including a pigmentation related haplotype allele can be performed using any method useful for identifying a particular nucleotide at a specific position in a nucleotide sequence or, where the nucleotide sequence encodes an amino acid sequence, by identifying an amino acid encoded by a codon of the nucleotide sequence, provided the nucleotide occurrences of the SNP result in a codons that encode different amino acids. Particularly useful methods include those that are readily adaptable to a high throughput format, to a multiplex format, or to both. In addition, a method of the invention can further include applying information relating to the pigment-related haplotype alleles to a matrix created using a feature modeling algorithm. For example, the feature modeling algorithm can be quadratic classifier or can perform a correspondence analysis.

[0018] Methods for detecting a nucleotide change can utilize one or more oligonucleotide probes or primers, including, for example, an amplification primer pair, that selectively hybridize to a target polynucleotide, which contains one or more pigmentation-related SNP positions. Oligonucleotide probes useful in practicing a method of the invention can include, for example, an oligonucleotide that is complementary to and spans a portion of the target polynucleotide, including the position of the SNP, wherein the presence of a specific nucleotide at the position (i.e., the SNP) is detected by the presence or absence of selective hybridization of the probe. Such a method can further include contacting the target polynucleotide and hybridized oligonucleotide with an endonuclease, and detecting the presence or absence of a cleavage product of the probe, depending on whether the nucleotide occurrence at the SNP site is complementary to the corresponding nucleotide of the probe. A pair of probes that specifically hybridize upstream and adjacent and downstream and adjacent to the site of the SNP, wherein one of the probes includes a nucleotide complementary to a nucleotide occurrence of the SNP, also can be used in an oligonucleotide ligation assay, wherein the presence or absence of a ligation product is indicative of the nucleotide occurrence at the SNP site. An oligonucleotide also can be useful as a primer, for example, for a primer extension reaction, wherein the product (or absence of a product) of the extension reaction is indicative of the nucleotide occurrence. In addition, a primer pair useful for amplifying a portion of the target polynucleotide including the SNP site can be useful, wherein the amplification product is examined to determine the nucleotide occurrence at the SNP site.

[0019] Where the particular nucleotide occurrence of a SNP, or nucleotide occurrences of a pigmentation-related haplotype, is such that the nucleotide occurrence results in an amino acid change in an encoded polypeptide, the nucleotide occurrence can be identified indirectly by detecting the particular amino acid in the polypeptide. The method for determining the amino acid will depend, for example, on the structure of the polypeptide or on the position of the amino acid in the polypeptide. Where the polypeptide contains only a single occurrence of an amino acid encoded by the particular SNP, the polypeptide can be examined for the presence or absence of the amino acid. For example, where the amino acid is at or near the amino terminus or the carboxy terminus of the polypeptide, simple sequencing of the terminal amino acids can be performed. Alternatively, the polypeptide can be treated with one or more enzymes and a peptide fragment containing the amino acid position of interest can be examined, for example, by sequencing the peptide, or by detecting a particular migration of the peptide following electrophoresis. Where the particular amino acid comprises an epitope of the polypeptide, the specific binding, or absence thereof, of an antibody specific for the epitope can be detected. Other methods for detecting a particular amino acid in a polypeptide or peptide fragment thereof are well known and can be selected based, for example, on convenience or availability of equipment such as a mass spectrometer, capillary electrophoresis system, magnetic resonance imaging equipment, and the like.

[0020] In another embodiment, a method of the invention allows an inference to be drawn as to hair color or hair shade of a human subject by identifying in a nucleic acid sample of the subject a penetrant pigmentation-related haplotype allele in at least one pigmentation gene, for example, in at least one of OCA2, ASIP, TYRP1, or MCV1R. For example, an inference can be drawn as to the hair color or hair shade of a human by identifying in a nucleic sample from the human a penetrant pigmentation-related haplotype allele, including in at least one of a) nucleotides of the ASIP gene corresponding to an ASIP-B haplotype, which include nucleotide 1381 of SEQ ID NO:227, [559], and nucleotide 880 of SEQ ID NO:229, [560]; b) nucleotides of the MC1R gene corresponding to an MC1R-A haplotype, which include nucleotide 915 [[442]] of SEQ ID NO:228 [[ ]] [217438], [[,]] nucleotide 1092 of SEQ ID NO:228 [217439], and, nucleotide 1119 of SEQ ID NO:228 [217441]; c) nucleotides of the OCA2 gene corresponding to an OCA2-G haplotype, which include nucleotide 210654 [[418]] of SEQ ID NO:225 [712060], nucleotide 147516 of SEQ ID NO:225, [886892], and nucleotide 114307 of SEQ ID NO:225 [marker 886896]; d) nucleotides of the OCA2 gene corresponding to a OCA2-H haplotype, which include nucleotide 108632 of SEQ ID NO:225, [217455], nucleotide 75403 of SEQ ID NO:225 [712057], and nucleotide 141832 of SEQ ID NO:225 [886894]; e) nucleotides of the OCA2 gene corresponding to a OCA2-I haplotype, which include nucleotide 132483 of SEQ ID NO:225 [217458], and nucleotide 67333 of SEQ ID NO:225, [712056]; f) nucleotides of the OCA2 gene corresponding to a OCA2-J haplotype, which include nucleotide 193050 of SEQ ID NO:225, [712054], and nucleotide 114220 of SEQ ID NO:225 [marker 886895]; or g) nucleotides of the TYRP1 gene corresponding to a TYRP1-C haplotype, which include nucleotide 16220 of SEQ ID NO:227, [217486], or, nucleotide 5463 of SEQ ID NO:227; [886937], or any combination of the above-listed penetrant pigmentation-related haplotypes.

[0021] For example, the penetrant pigmentation-related haplotype allele can be a) the ASIP-B haplotype allele GA or AA; b) the MC1R-A haplotype allele CCC, CTC, TCC or CCT; c) the OCA2-G haplotype allele AGG or AGA; d) the OCA2-H haplotype allele AGT or ATT; e) the OCA2-I haplotype allele TG; f) the OCA2-J haplotype allele GA or AA; or g) the TYRP1-C haplotype allele AA or TA; or a combination thereof, including, for example, the ASIP-B haplotype, the MC1R-A haplotype, the OCA2-G haplotype, the OCA2-H haplotype, the OCA2-I haplotype, the OCA2-J haplotype, and the TYRP1-C haplotype. Furthermore, as disclosed herein, an inference as to hair color or hair shade can be strengthened by further identifying, in addition to the at least one penetrant pigmentation related haplotype, in the nucleic acid sample, at least one latent pigmentation-related SNP of a pigmentation gene or at least one latent pigmentation-related haplotype allele, or a combination thereof.

[0022] In still another embodiment, a method of the invention allows an inference to be drawn as to the race of a human subject from a nucleic acid sample of the subject. Such a method can be performed, for example, by identifying in the nucleic acid sample, the nucleotide occurrence of at least one race-related single nucleotide polymorphism (SNP) of a race-related gene, whereby the nucleotide occurrence of the race-related SNP is associated with race. The race-related gene can include at least one of OCA2, ASIP, CYP2D6, TYRP1, CYP2C9, CYP3A4, TYR, MC1R, AP3B1, AP3D1, AP3D1, DCT, SILV, AIM-1 protein (LOC51151), POMC, OA1, MITF, MYO5A, RAB27A, F2RL1, HMGCR, FDPS, AHR, or CYP1A1, or can be a combination of nucleotide occurrence of a race-related SNP in any two or more of the above-listed genes, including in all of the genes.

[0023] A method of inferring the race of a human subject can be strengthened, for example, by identifying a nucleotide occurrence in each of at least two race-related SNPs, and grouping the identified nucleotide occurrences of the race-related SNPs into one or more race-related haplotype alleles, wherein the relationship of the haplotype allele(s) to race is known. For example, the race-related haplotype can be a race-related haplotype such as a) nucleotides of the DCT gene corresponding to a DCT-A haplotype, which includes nucleotide 27585 of SEQ ID NO:226 [702], nucleotide 8298 of SEQ ID NO:226 [650], and nucleotide 32086 of SEQ ID NO:226 [marker 675]; b) nucleotides of the MC1R gene corresponding to an MC1R-A haplotype, which includes nucleotide 915 of SEQ ID NO:228 [[ ]] [217438], nucleotide 1092 of SEQ ID NO:228 [217439], and nucleotide 1119 of SEQ ID NO:228 [217441]; c) nucleotides of the OCA2 gene corresponding to an OCA2-A haplotype, which includes nucleotide 132483 of SEQ ID NO:225 [217458], nucleotide 141832 of SEQ ID NO:225 [886894], nucleotide 114220 of SEQ ID NO:225 [marker 886895], and nucleotide 114307 of SEQ ID NO:225 [marker 886896]; d) nucleotides of the OCA2 gene corresponding to an OCA2-B haplotype, which includes nucleotide 84355 of SEQ ID NO:225 [marker 217452]], nucleotide 418566 of SEQ ID NO:225 [marker 712052], and nucleotide 113047 of SEQ ID NO:225 [marker 886994]; e) nucleotides of the OCA2 gene corresponding to an OCA2-C haplotype, which includes nucleotide 75403 of SEQ ID NO:225 [712057], nucleotide 144364 of SEQ ID NO:225 [712058], nucleotide 210654 [[418]] of SEQ ID NO:225 [712060], and nucleotide 147364 of SEQ ID NO:225, [712064]; f) nucleotides of the OCA2 gene, corresponding to an OCA2-D haplotype, which includes nucleotide 193050 of SEQ ID NO:225, [712054], nucleotide 67333 of SEQ ID NO:225, [712056], or nucleotide 147516 of SEQ ID NO:225, [886892]; g) nucleotides of the OCA2 gene, corresponding to an OCA2-E haplotype, which includes nucleotide 108632 of SEQ ID NO:225, [217455], nucleotide 108680 of SEQ ID NO:225, [712061], and nucleotide 147516 of SEQ ID NO:225, [886892]; or h) nucleotides of the TYRP1 gene corresponding to a TYRP1-B haplotype which includes nucleotide 11359 of SEQ ID NO:227, [886938], nucleotide 14903 of SEQ ID NO:227; [886943], or any combination of the above listed race-related haplotypes.

[0024] The inference also can be strengthened by identifying in the nucleic acid sample at least one race-related haplotype allele of a race-related gene. For example, a race-related haplotype allele can include nucleotide occurrences for a) nucleotides of the ASIP gene corresponding to a ASIP-A haplotype, which includes nucleotide 429 of SEQ ID NO:227 [marker 552], and nucleotide 3037 of SEQ ID NO:227 [marker 468]; b) nucleotides of the DCT gene corresponding to a DCT-B haplotype, which includes nucleotide 27427 of SEQ ID NO:226 [marker 710], and nucleotide 2543 of SEQ ID NO:226 [marker 657]; c) nucleotides of the SILV gene corresponding to a SILV-A haplotype, which includes nucleotide 11799 of SEQ ID NO:230 [marker 656], and nucleotide 8481 of SEQ ID NO:230; d) nucleotides of the TYR gene corresponding to a TYR-A haplotype, which includes nucleotide 106523 of SEQ ID NO:231 [marker 278], and nucleotide 107830 [[114]] of SEQ ID NO:231 [marker 386]; e) nucleotides of the TYR-B gene corresponding to a TYRP-B haplotype, which include nucleotide 15939 of SEQ ID NO:227 [[ ]] [marker 217485], nucleotide 4998 of SEQ ID NO:227 [[48]] [marker 886933], or nucleotide 5463 of SEQ ID NO:227 [[49]] [marker 886937], or any combination of the above listed race-related haplotype alleles.

[0025] As such, it will be recognized that a very strong inference as to race can be drawn by identifying combinations of race-related haplotype alleles, which include genotype alleles (i.e., alleles of diploid pairs of haplotypes), including, for example, a combination of the MCV1R-A haplotype, the OCA2-A haplotype, the OCA2-B haplotype, the OCA2-C haplotype, the OCA2-D haplotype, the OCA2-E haplotype, the TYRP1-B haplotype, and the DCT-B haplotype; and the ASIP-A haplotype, the DCT-B haplotype, the SILV-A haplotype, the TYR-A haplotype, and the TYRP1-A haplotype. For example, the combination can include MC1R-A haplotype allele CCC; OCA2-A haplotype allele TTAA, CCAG, or TTAG; OCA2-B haplotype allele CAA, CGA, CAC, or CGC; OCA2-C haplotype allele GGAA, TGAA, or TAAA; OCA2-D haplotype allele AGG or GGG; OCA2-E haplotype allele GCA; TYRP1-B haplotype allele TC; and DCT-B haplotype allele CTG, or GTG; and ASIP-A haplotype allele GT or AT; DCT-B haplotype allele TA or TG; SILV-A haplotype allele TT, TC, or CC; TYR-A haplotype allele GA, AA, GG; and TYRP1-A haplotype allele GTG, TTG, or GTT.

[0026] In another embodiment, a method for inferring race of a human subject can be performed by identifying a nucleotide occurrence in the sample for at least one race-related SNP from a race-related gene such as OCA2, ASIP, CYP2D6, TYRP1, CYP2C9, CYP3A4, TYR, MC1R, AP3B1, AP3D1, AP3D1, DCT, SILV, AIM-1 (LOC51151), POMC, OA1, MITF, MYO5A, RAB27A, F2RL1, HMGCR, FDPS, AHR, or CYP1A1, whereby the nucleotide occurrence is associated with the race of the human subject. In addition, as disclosed herein, the inference can be strengthened by further identifying in the nucleic acid sample at least one nucleotide occurrence for at least a second race-related SNP of at least a second race-related gene such as the OCA2, ASIP, TYRP1, TYR, AP3B1, AP3D1, AP3D1, DCT, SILV, LOC51151, POMC, OA1, MITF, MYO5A, RAB27A, F2RL1, MC1R, CYP2D6, CYP2C9, CYP3A4, AP3B1, HMGCR, FDPS, AHR, or CYP1A1 gene. For example, the position of the nucleotide occurrence can be nucleotide 27585 of SEQ ID NO:226 [marker 702], nucleotide 8298 of SEQ ID NO:226 [marker 650], nucleotide 32086 of SEQ ID NO:226 [marker 675], nucleotide 915 [[442]] of SEQ ID NO:228 [[ ]] [marker 217438], nucleotide 1092 of SEQ ID NO:228 [marker 217439], nucleotide 1119 of SEQ ID NO:228 [marker 217441]; nucleotide 132483 of SEQ ID NO:225 [marker 217458], nucleotide 141832 of SEQ ID NO:225 [marker 886894], nucleotide 114220 of SEQ ID NO:225 [marker 886895], nucleotide 114307 of SEQ ID NO:225 [marker 886896], nucleotide 84355 of SEQ ID NO:225 [217452], nucleotide 418566 of SEQ ID NO:225 [712052], nucleotide 113047 of SEQ ID NO:225 [marker 886994], nucleotide 75403 of SEQ ID NO:225 [[14]] [marker 712057], nucleotide 144364 of SEQ ID NO:225 [marker 712058], nucleotide 210654 of SEQ ID NO:225 [marker 712060], nucleotide 147364 of SEQ ID NO:225 [marker 712064], nucleotide 193050 of SEQ ID NO:225 [marker 712054], nucleotide 67333 of SEQ ID NO:225 [marker 712056], nucleotide 147516 of SEQ ID NO:225 [marker 886892], nucleotide 108632 of SEQ ID NO:225 [marker 217455], nucleotide 108680 of SEQ ID NO:225 [marker 712061], nucleotide 147516 of SEQ ID NO:225 [marker 886892], nucleotide 11359 of SEQ ID NO:227 [marker 886938], nucleotide 14903 of SEQ ID NO:227 [marker 886943], nucleotide 880 of SEQ ID NO:229 [marker 560], nucleotide 429 of SEQ ID NO:227 [marker 552], nucleotide 1381 of SEQ ID NO:227 [marker 559], nucleotide 3037 of SEQ ID NO:227 [marker 468], nucleotide 2543 of SEQ ID NO:226 [marker 657], nucleotide 11764 of SEQ ID NO:226 [marker 674], nucleotide 29117 of SEQ ID NO:226 [marker 632], nucleotide 4269 of SEQ ID NO:226 [marker 701], nucleotide 27427 of SEQ ID NO:226 [marker 710]; nucleotide 114086 of SEQ ID NO:225 [marker 217456], nucleotide 11799 of SEQ ID NO:230 [marker 656], nucleotide 8481 of SEQ ID NO:230, nucleotide 8699 of SEQ ID NO:230 [marker 637], nucleotide 106523 of SEQ ID NO:231 [marker 278], nucleotide 107830 of SEQ ID NO:231 [marker 386], nucleotide 118064 of SEQ ID NO:231 [marker 217480], nucleotide 50575 of SEQ ID NO:231 [marker 951497], nucleotide 1080 of SEQ ID NO:231 [marker 217468], nucleotide 107348 of SEQ ID NO:231 [marker 217473], nucleotide 15939 of SEQ ID NO:227 [[ ]] [marker 217485], nucleotide 16220 of SEQ ID NO:227 [marker 217486], nucleotide 1084 [[314]] of SEQ ID NO:227 [marker 869787], nucleotide 224 of SEQ ID NO:227 [marker 869745], nucleotide 4998 of SEQ ID NO:227 [marker 886933], nucleotide 5463 of SEQ ID NO:227 [marker 886937], or nucleotide 14820 of SEQ ID NO:227 [marker 886942], nucleotide 207 of SEQ ID NO:51 [marker 217459], nucleotide 428 of SEQ ID NO:52 [marker 217460], nucleotide 4998 of SEQ ID NO:227 [marker 217487], nucleotide 459 of SEQ ID NO:54 [marker 217489], nucleotide 1528 of SEQ ID NO:55 [marker 554353], nucleotide 1093 of SEQ ID NO:56 [marker 554363], nucleotide 1274 of SEQ ID NO:57 [marker 554368], nucleotide 1024 of SEQ ID NO:58 [marker 554370], nucleotide 1159 of SEQ ID NO:59 [marker 554371], nucleotide 484 of SEQ ID NO:60 [marker 615921], nucleotide 619 of SEQ ID NO:61 [marker 615925], nucleotide 551 of SEQ ID NO:62 [marker 615926], nucleotide 1177 of SEQ ID NO:63 [marker 664784], nucleotide 1185 of SEQ ID NO:64 [marker 664785], nucleotide 1421 of SEQ ID NO:65 [664793], nucleotide 1466 of SEQ ID NO:66 [marker 664802], nucleotide 1311 of SEQ ID NO:67 [marker 664803], nucleotide 808 of SEQ ID NO:68 [marker 712037], nucleotide 1005 of SEQ ID NO:69 [marker 712047], nucleotide 743 of SEQ ID NO:70 [marker 712051], nucleotide 418 of SEQ ID NO:71 [marker 712055], nucleotide 884 of SEQ ID NO:72 [marker 712059], nucleotide 744 of SEQ ID NO:73 [marker 712043], nucleotide 360 of SEQ ID NO:74 [marker 756239], nucleotide 455 of SEQ ID NO:75 [marker 756251], nucleotide 519 of SEQ ID NO:76 [marker 809125], nucleotide 277 of SEQ ID NO:77 [marker 869769], nucleotide 227 of SEQ ID NO:78 [marker 869772], nucleotide 270 of SEQ ID NO:79 [marker 869777], nucleotide 216 of SEQ ID NO:80 [marker 869784], nucleotide 172 of SEQ ID NO:81 [marker 869785], nucleotide 176 of SEQ ID NO:82 [marker 869794], nucleotide 145 of SEQ ID NO:83 [marker 869797], nucleotide 164 of SEQ ID NO:84 [marker 869798], nucleotide 166 of SEQ ID NO:85 [marker 869802], nucleotide 213 of SEQ ID NO:86 [marker 869809], nucleotide 218 of SEQ ID NO:87 [marker 869810], nucleotide 157 of SEQ ID NO:88 [marker 869813], nucleotide 837 of SEQ ID NO:89 [marker 886934], nucleotide 229 of SEQ ID NO:90 [marker 886993], nucleotide 160 of SEQ ID NO:91 [marker 951526], or any combination thereof.

[0027] The invention also relates to a method for inferring a genetic pigmentation trait of a human subject from a nucleic acid sample of the human subject by identifying a nucleotide occurrence in the sample for a pigmentation-related SNP from a pigmentation gene, provided the pigmentation gene is not the melanocortin-1 receptor (MC1R) gene. For example, the method can be practiced by identifying a nucleotide occurrence in the sample for at least one pigmentation-related SNP from a pigmentation gene such as OCA2, ASIP, CYP2D6, TYRP1, CYP2C9, CYP3A4, TYR, MC1R, AP3B1, AP3D1, AP3D1, DCT, SILV, AIM-1 protein (LOC51151), POMC, OA1, MITF, MYO5A, RAB27A, F2RL1, HMGCR, FDPS, AHR, or CYP1A1, whereby the nucleotide occurrence is associated with the pigmentation trait of the human subject. In addition, the method can further include identifying in the nucleic acid sample at least one nucleotide occurrence for at least a second pigmentation-related SNP of at least a second pigmentation gene such as OCA2, ASIP, TYRP1, TYR, AP3B1, AP3D1, AP3D1, DCT, SILV, LOC51151, POMC, OA1, MITF, MYO5A, RAB27A, F2RL1, or MC1R.

[0028] The genetic pigmentation trait inferred according to a method of the invention can be hair color, hair shade, eye color, or eye shade, and further can be race. Where the pigmentation trait is eye shade or eye color, pigmentation gene can be the OCA2 gene, DCT gene, MC1R gene, or TYRP1 gene, or any combination thereof. A SNP identified according to a method of the invention can be a SNP of a penetrant haplotype associated with eye color or eye shade, for example, a nucleotide occurrence such as nucleotide 27585 of SEQ ID NO:226 [marker 702], nucleotide 8298 of SEQ ID NO:226 [marker 650], nucleotide 32086 of SEQ ID NO:226 [marker 675], nucleotide 915 [[442]] of SEQ ID NO:228 [[ ]] [marker 217438], nucleotide 1092 of SEQ ID NO:228 [marker 217439], nucleotide 1119 of SEQ ID NO:228 [marker 217441]; nucleotide 132483 of SEQ ID NO:225 [marker 217458], nucleotide 141832 of SEQ ID NO:225 [marker 886894], nucleotide 114220 of SEQ ID NO:225 [marker 886895], nucleotide 114307 of SEQ ID NO:225 [marker 886896], nucleotide 84355 of SEQ ID NO:225 [217452], nucleotide 418566 of SEQ ID NO:225 [712052], nucleotide 113047 of SEQ ID NO:225 [marker 886994], nucleotide 75403 of SEQ ID NO:225 [marker 712057], nucleotide 144364 of SEQ ID NO:225 [marker 712058], nucleotide 210654 [[418]] of SEQ ID NO:225 [marker 712060], nucleotide 147364 of SEQ ID NO:225 [marker 712064], nucleotide 193050 of SEQ ID NO:225 [marker 712054], nucleotide 67333 of SEQ ID NO:225 [marker 712056], nucleotide 147516 of SEQ ID NO:225 [marker 886892], nucleotide 108632 of SEQ ID NO:225 [marker 217455], nucleotide 108680 of SEQ ID NO:225 [marker 712061], nucleotide 147516 of SEQ ID NO:225 [marker 886892], nucleotide 11359 of SEQ ID NO:227 [marker 886938], or nucleotide 14903 of SEQ ID NO:227 [marker 886943], or any combination thereof. The SNP also can be a SNP of a latent haplotype associated with eye color or eye shade, for example, a nucleotide occurrence such as nucleotide 880 of SEQ ID NO:229 [marker 560], nucleotide 429 of SEQ ID NO:227 [marker 552], nucleotide 1381 of SEQ ID NO:227 [marker 559], nucleotide 3037 of SEQ ID NO:227 [marker 468], nucleotide 2543 of SEQ ID NO:226 [marker 657], nucleotide 11764 of SEQ ID NO:226 [marker 674], nucleotide 29117 of SEQ ID NO:226 [marker 632], nucleotide 4269 of SEQ ID NO:226 [marker 701], nucleotide 27427 of SEQ ID NO:226 [marker 710]; nucleotide 114086 of SEQ ID NO:225 [marker 217456], nucleotide 11799 of SEQ ID NO:230 [marker 656], nucleotide 8481 of SEQ ID NO:230, nucleotide 8699 of SEQ ID NO:230 [marker 637], nucleotide 106523 of SEQ ID NO:231 [marker 278], nucleotide 107830 of SEQ ID NO:231 [marker 386], nucleotide 118064 of SEQ ID NO:231 [[40]] [marker 217480], nucleotide 50575 of SEQ ID NO:231 [[41]] [marker 951497], nucleotide 1080 of SEQ ID NO:231 [[42]] [marker 217468], nucleotide 107348 of SEQ ID NO:231 [[43]] [marker 217473], nucleotide 15939 of SEQ ID NO:227 [[ ]] [marker 217485], nucleotide 16220 of SEQ ID NO:227 [[45]] [marker 217486], nucleotide 1084 of SEQ ID NO:227 [[46]] [marker 869787], nucleotide 224 of SEQ ID NO:227 [[47]] [marker 869745], nucleotide 4998 of SEQ ID NO:227 [[48]] [marker 886933], nucleotide 5463 of SEQ ID NO:227 [[49]] [marker 886937], or nucleotide 14820 of SEQ ID NO:227 [marker 886942], or any combination thereof.

[0029] Where the pigmentation trait is hair color or hair shade, a SNP identified according to a method of the invention can be a SNP of a penetrant haplotype associated with hair color or hair shade, for example, a nucleotide occurrence such as nucleotide 1381 of SEQ ID NO:227 [marker 559], nucleotide 880 of SEQ ID NO:229 [marker 560], nucleotide 915 of SEQ ID NO:228 [marker 217438], nucleotide 1092 of SEQ ID NO:228 [marker 217439], nucleotide 1119 of SEQ ID NO:228 [marker 217441], nucleotide 210654 [[418]] of SEQ ID NO:225 [marker 712060], nucleotide 147516 of SEQ ID NO:225 [marker 886892], nucleotide 114307 of SEQ ID NO:225 [marker 886896], nucleotide 108632 of SEQ ID NO:225 [marker 217455], nucleotide 75403 of SEQ ID NO:225 [[14]] [marker 712057], nucleotide 141832 of SEQ ID NO:225 [marker 886894], nucleotide 132483 of SEQ ID NO:225 [marker 217458], nucleotide 67333 [[554]] of SEQ ID NO:225 [marker 712056], nucleotide 193050 of SEQ ID NO:225 [marker 712054], nucleotide 114220 of SEQ ID NO:225 [marker 886895], nucleotide 16220 [[473]] of SEQ ID NO:227 [[45]], [217486], or nucleotide 5463 [[214]] of SEQ ID NO:227 [[49]]; [886937], or any combination thereof.

[0030] A method for inferring a genetic pigmentation trait of a human subject from a nucleic acid sample of the human subject by identifying a nucleotide occurrence in the sample for a pigmentation-related SNP from a pigmentation gene can further include grouping the nucleotide occurrences of the pigmentation-related SNPs for a gene into one or more haplotype alleles. The identified haplotype alleles then can be compared to known haplotype alleles such that, when the relationship of the known haplotype alleles to the genetic pigmentation trait is known, an inference can be drawn as to the genetic pigmentation trait of the subject providing the nucleic acid sample. Identification of the nucleotide occurrence can be performed using any method suitable for examining the particular sample. For example, wherein the sample contains nucleic acid molecules, the identification can be performed by contacting polynucleotides in (or derived from) the sample with a specific binding pair member that selectively hybridizes to a region of the polynucleotide that includes the pigmentation-related SNP, under conditions wherein the binding pair member specifically binds at or near the pigmentation-related SNP. The binding pair member can be any molecule that specifically binds or associates with the target polynucleotide, including, for example, an antibody or an oligonucleotide.

[0031] The invention also relates to a method for classifying an individual as being a member of a group sharing a common characteristic. Such a method can be performed, for example, by identifying a nucleotide occurrence of a SNP in a polynucleotide of the individual, wherein the SNP corresponds to nucleotide 16220 [[473]] of SEQ ID NO:227 [[45]] [marker 217486], nucleotide 224 of SEQ ID NO:227 [[47]] [marker 869745], nucleotide 1084 [[314]] of SEQ ID NO:227 [[46]] [marker 869787], nucleotide 147516 of SEQ ID NO:225 [marker 886892], nucleotide 114220 of SEQ ID NO:225 [marker 886895], nucleotide 114307 of SEQ ID NO:225 [marker 886896], nucleotide 4998 of SEQ ID NO:227 [[48]] [marker 886933], nucleotide 5463 [[214]] of SEQ ID NO:227 [[49]] [marker 886937], nucleotide 113047 of SEQ ID NO:225 [marker 886994], nucleotide 141832 of SEQ ID NO:225 [marker 886894], nucleotide 11359 of SEQ ID NO:227 [marker 886938], nucleotide 14903 of SEQ ID NO:227 [[24]] [marker 886943], or nucleotide 14820 of SEQ ID NO:227 [marker 886942], or any combination thereof. Such a method can be performed, for example, using an amplification reaction or a primer extension reaction.

[0032] The invention further relates to a method for detecting a nucleotide occurrence for a SNP of a human pigmentation gene. Such a method can be performed, for example, by contacting a sample containing a polynucleotide with a specific binding pair member, which can specifically bind at or near a sequence of the polynucleotide suspected of being polymorphic, including a nucleotide occurrence corresponding to nucleotide 16220 of SEQ ID NO:227 [[45]] [marker 217486], nucleotide 224 of SEQ ID NO:227 [[47]] [marker 869745], nucleotide 1084 [[314]] of SEQ ID NO:227 [[46]] [marker 869787], nucleotide 147516 of SEQ ID NO:225 [marker 886892], nucleotide 114220 of SEQ ID NO:225 [marker 886895], nucleotide 114307 of SEQ ID NO:225 [marker 886896], nucleotide 4998 of SEQ ID NO:227 [[48]] [marker 886933], nucleotide 5463 [[214]] of SEQ ID NO:227 [[49]] [marker 886937], nucleotide 113047 of SEQ ID NO:225 [marker 886994], nucleotide 141832 of SEQ ID NO:225 [marker 886894], nucleotide 11359 of SEQ ID NO:227 [marker 886938], nucleotide 14903 of SEQ ID NO:227 [[24]] [marker 886943], or nucleotide 14820 of SEQ ID NO:227 [marker 886942], or any combination thereof; and detecting selective binding of the specific binding pair member, wherein selective binding is indicative of the presence of the nucleotide occurrence.

[0033] The invention also relates to an isolated primer pair, which can be useful for determining a nucleotide occurrence of a SNP in a polynucleotide, wherein the primer pair includes a forward primer that can selectively bind to the polynucleotide upstream of the SNP position on one strand, and a reverse primer that can selectively bind to the polynucleotide upstream of the SNP position on a complementary strand, wherein the SNP position corresponds to nucleotide 16220 [[473]] of SEQ ID NO:227 [[45]] [marker 217486], nucleotide 224 of SEQ ID NO:227 [[47]] [marker 869745], nucleotide 1084 [[314]] of SEQ ID NO:227 [[46]] [marker 869787], nucleotide 147516 of SEQ ID NO:225 [marker 886892], nucleotide 114220 of SEQ ID NO:225 [marker 886895], nucleotide 114307 of SEQ ID NO:225 [marker 886896], nucleotide 4998 of SEQ ID NO:227 [[48]] [marker 886933], nucleotide 5463 [[214]] of SEQ ID NO:227 [[49]] [marker 886937], nucleotide 113047 of SEQ ID NO:225 [marker 886994], nucleotide 141832 of SEQ ID NO:225 [marker 886894], nucleotide 11359 of SEQ ID NO:227 [marker 886938], nucleotide 14903 of SEQ ID NO:227 [[24]] [marker 886943], or nucleotide 14820 of SEQ ID NO:227 [marker 886942].

[0034] In addition, the invention relates to an isolated specific binding pair member, which can be useful for determining a nucleotide occurrence of a SNP in a target polynucleotide, particularly a region of a pigmentation gene or xenobiotic gene including a SNP, as disclosed herein. For example, a specific binding pair member of the invention can be an oligonucleotide or an antibody that, under the appropriate conditions, selectively binds to a target polynucleotide at or near nucleotide 16220 of SEQ ID NO:227 [[45]] [marker 217486], nucleotide 224 of SEQ ID NO:227 [[47]] [marker 869745], nucleotide 1084 [[314]] of SEQ ID NO:227 [[46]] [marker 869787], nucleotide 147516 of SEQ ID NO:225 [marker 886892], nucleotide 114220 of SEQ ID NO:225 [marker 886895], nucleotide 114307 of SEQ ID NO:225 [marker 886896], nucleotide 4998 of SEQ ID NO:227 [[48]] [marker 886933], nucleotide 5463 of SEQ ID NO:227 [[49]] [marker 886937], nucleotide 113047 of SEQ ID NO:225 [marker 886994], nucleotide 141832 of SEQ ID NO:225 [marker 886894], nucleotide 11359 of SEQ ID NO:227 [marker 886938], nucleotide 14903 of SEQ ID NO:227 [[24]] [marker 886943], or nucleotide 14820 of SEQ ID NO:227 [marker 886942]. As such, a specific binding pair member of the invention can be an oligonucleotide probe, which can selectively hybridize to a target polynucleotide and can, but need not, be a substrate for a primer extension reaction, or an anti-nucleic acid antibody. The specific binding pair member can be selected such that it selectively binds to any portion of a target polynucleotide, as desired, for example, to a portion of a target polynucleotide containing a SNP as the terminal nucleotide.

[0035] The invention also relates isolated polynucleotides comprising a portion of a gene including a SNP associated with a genetic pigmentation trait, wherein the isolated polynucleotide is at least about 30 nucleotides in length (for example, about 40, 50, 100, 200, 250, or 500 nucleotides in length). Polynucleotides of the invention are exemplified by a polynucleotide of at least about 30 nucleotides of the human OCA2 gene, and including at least a thymidine residue at a nucleotide corresponding to nucleotide 141832 of SEQ ID NO:225 [marker 886894], a guanidine residue at a nucleotide corresponding to nucleotide 114220 of SEQ ID NO:225 [marker 886895], a cytidine residue at a nucleotide corresponding to nucleotide 147516 of SEQ ID NO:225 [marker 886892], a thymidine residue at a nucleotide corresponding to nucleotide 114307 of SEQ ID NO:225 [marker 886896], an adenosine residue at a nucleotide corresponding to nucleotide 113047 of SEQ ID NO:225 [marker 886994], or a combination of such residues; and by a polynucleotide of at least about 30 nucleotides of the human TYRP gene, and including at least a thymidine residue at a nucleotide corresponding to nucleotide 11359 of SEQ ID NO:227 [marker 886938], a thymidine residue at a nucleotide corresponding to nucleotide 14903 of SEQ ID NO:227 [[24]] [marker 886943], a thymidine residue at a nucleotide corresponding to nucleotide 16220 [[473]] of SEQ ID NO:227 [[45]] [marker 217486], a cytidine residue at a nucleotide corresponding to nucleotide 224 of SEQ ID NO:227 [[47]] [marker 869745], a guanidine residue at a nucleotide corresponding to nucleotide 1084 of SEQ ID NO:227 [[46]] [marker 869787], a cytidine residue at a nucleotide corresponding to nucleotide 4998 of SEQ ID NO:227 [[48]] [marker 886933], a thymidine residue at a nucleotide corresponding to nucleotide 5463 of SEQ ID NO:227 [[49]] [marker 886937], a adenosine residue at a nucleotide corresponding to nucleotide 14820 of SEQ ID NO:227 [marker 886942], or a combination of such residues.

[0036] An isolated polynucleotide of the invention, which generally is at least about 30 nucleotides in length, also can be, for example, an isolated segment of an DCT gene, wherein nucleotides CTG or GTG occur at positions corresponding to nucleotide 27585 of SEQ ID NO:226 [702], nucleotide 8298 of SEQ ID NO:226 [marker 650], and nucleotide 32086 of SEQ ID NO:226 [675], respectively; or an isolated segment of an MC1R gene, wherein nucleotides CCC occur at positions corresponding to nucleotide 915 [[442]] of SEQ ID NO:228 [[ ]] [217438], nucleotide 1092 of SEQ ID NO:228 [217439], and nucleotide 1119 of SEQ ID NO:228 [217441], respectively; or an isolated segment of an OCA2 gene, wherein nucleotides TTAA, CCAG, or TTAG occur at positions corresponding to nucleotide 132483 of SEQ ID NO:225 [217458], nucleotide 141832 of SEQ ID NO:225 [886894], nucleotide 114220 of SEQ ID NO:225 [886895], and nucleotide 114307 of SEQ ID NO:225 [886896], respectively; or an isolated segment of the OCA2 gene, wherein nucleotides CAA, CGA, CAC, or CGC occur at positions corresponding to position 84355 of SEQ ID NO:225 [217452], position 418566 of SEQ ID NO:225 [712052], and position 113047 of SEQ ID NO:225 [886994], respectively; or an isolated segment of the OCA2 gene, wherein nucleotides GGAA, TGAA, and TAAA occur at positions corresponding to nucleotide 75403 of SEQ ID NO:225 [[14]] [712057], nucleotide 144364 of SEQ ID NO:225 [712058], nucleotide 210654 [[418]] of SEQ ID NO:225 [712060], and nucleotide 147364 of SEQ ID NO:225 [712064], respectively; or an isolated segment of the OCA2 gene, wherein nucleotides AGG or GGG occur at positions corresponding to nucleotide 193050 of SEQ ID NO:225 [712054], nucleotide 67333 [[554]] of SEQ ID NO:225 [712056], and nucleotide 147516 of SEQ ID NO:225 [886892], respectively; or an isolated segment of the OCA2 gene, wherein nucleotides GCA occur at positions corresponding to nucleotide 108632 of SEQ ID NO:225 [217455], nucleotide 108680 of SEQ ID NO:225 [712061], and nucleotide 147516 of SEQ ID NO:225 [886892], respectively; or an isolated segment of a TYRP1 gene, wherein nucleotides TC occur at positions corresponding to nucleotide 11359 of SEQ ID NO:227 [886938], and nucleotide 14903 of SEQ ID NO:227 [[24]] [886943], respectively. In one embodiment, an isolated polynucleotide of the invention is derived from the OCA2 gene and includes comprises any combination of the nucleotides TTAA, CCAG, or TTAG at positions corresponding to nucleotide 132483 of SEQ ID NO:225 [217458], nucleotide 141832 of SEQ ID NO:225 [886894], nucleotide 114220 of SEQ ID NO:225 [886895], and nucleotide 114307 of SEQ ID NO:225 [886896], respectively; nucleotides CAA, CGA, CAC, or CGC at positions corresponding to position Y84355 of SEQ ID NO:225 [217452], position 418566 of SEQ ID NO:225 [712052], and position 113047 of SEQ ID NO:225 [886994], respectively; nucleotides GGAA, TGAA, and TAAA at positions corresponding to nucleotide 75403 of SEQ ID NO:225 [[14]] [712057], nucleotide 144364 of SEQ ID NO:225 [712058], nucleotide 210654 [[418]] of SEQ ID NO:225 [712060], and nucleotide 147364 of SEQ ID NO:225 [712064], respectively; nucleotides AGG or GGG at positions corresponding to nucleotide 193050 of SEQ ID NO:225 [712054], nucleotide 67333 [[554]] of SEQ ID NO:225 [712056], and nucleotide 147516 of SEQ ID NO:225 [886892], respectively; and nucleotides GCA at positions corresponding to nucleotide 108632 of SEQ ID NO:225 [217455], nucleotide 108680 of SEQ ID NO:225 [712061], and nucleotide 147516 of SEQ ID NO:225 [886892], respectively. An isolated polynucleotide of the invention, which generally is at least about 30 nucleotides in length, also can be, for example, an isolated segment of an DCT gene, wherein nucleotides CTG or GTG occur at positions corresponding to nucleotide 27585 of SEQ ID NO:226 [702], nucleotide 8298 of SEQ ID NO:226 [marker 650], and nucleotide 32086 of SEQ ID NO:226 [675], respectively; or an isolated segment of an MC1R gene, wherein nucleotides CCC occur at positions corresponding to nucleotide 915 [[442]] of SEQ ID NO:228 [[ ]] [217438], nucleotide 1092 of SEQ ID NO:228 [217439], and nucleotide 1119 of SEQ ID NO:228 [217441], respectively; or an isolated segment of an OCA2 gene, wherein nucleotides TTAA, CCAG, or TTAG occur at positions corresponding to nucleotide 132483 of SEQ ID NO:225 [217458], nucleotide 141832 of SEQ ID NO:225 [886894], nucleotide 114220 of SEQ ID NO:225 [886895], and nucleotide 114307 of SEQ ID NO:225 [886896], respectively; or an isolated segment of the OCA2 gene, wherein nucleotides CAA, CGA, CAC, or CGC occur at positions corresponding to position 84355 of SEQ ID NO:225 [217452], position 418566 of SEQ ID NO:225 [712052], and position 113047 of SEQ ID NO:225 [886994], respectively; or an isolated segment of the OCA2 gene, wherein nucleotides GGAA, TGAA, and TAAA occur at positions corresponding to nucleotide 75403 of SEQ ID NO:225 [[14]] [712057], nucleotide 144364 of SEQ ID NO:225 [712058], nucleotide 210654 [[418]] of SEQ ID NO:225 [712060], and nucleotide 147364 of SEQ ID NO:225 [712064], respectively; or an isolated segment of the OCA2 gene, wherein nucleotides AGG or GGG occur at positions corresponding to nucleotide 193050 of SEQ ID NO:225 [712054], nucleotide 67333 [[554]] of SEQ ID NO:225 [712056], and nucleotide 147516 of SEQ ID NO:225 [886892], respectively; or an isolated segment of the OCA2 gene, wherein nucleotides GCA occur at positions corresponding to nucleotide 108632 of SEQ ID NO:225 [217455], nucleotide 108680 of SEQ ID NO:225 [712061], and nucleotide 147516 of SEQ ID NO:225 [886892], respectively; or an isolated segment of a TYRP1 gene, wherein nucleotides TC occur at positions corresponding to nucleotide 11359 of SEQ ID NO:227 [886938], and nucleotide 14903 of SEQ ID NO:227 [[24]] [886943], respectively. In one embodiment, an isolated polynucleotide of the invention is derived from the OCA2 gene and includes comprises any combination of the nucleotides TTAA, CCAG, or TTAG at positions corresponding to nucleotide 132483 of SEQ ID NO:225 [217458], nucleotide 141832 of SEQ ID NO:225 [886894], nucleotide 114220 of SEQ ID NO:225 [886895], and nucleotide 114307 of SEQ ID NO:225 [886896], respectively; nucleotides CAA, CGA, CAC, or CGC at positions corresponding to position Y84355 of SEQ ID NO:225 [217452], position 418566 of SEQ ID NO:225 [712052], and position 113047 of SEQ ID NO:225 [886994], respectively; nucleotides GGAA, TGAA, and TAAA at positions corresponding to nucleotide 75403 of SEQ ID NO:225 [[14]] [712057], nucleotide 144364 of SEQ ID NO:225 [712058], nucleotide 210654 [[418]] of SEQ ID NO:225 [712060], and nucleotide 147364 of SEQ ID NO:225 [712064], respectively; nucleotides AGG or GGG at positions corresponding to nucleotide 193050 of SEQ ID NO:225 [712054], nucleotide 67333 [[554]] of SEQ ID NO:225 [712056], and nucleotide 147516 of SEQ ID NO:225 [886892], respectively; and nucleotides GCA at positions corresponding to nucleotide 108632 of SEQ ID NO:225 [217455], nucleotide 108680 of SEQ ID NO:225 [712061], and nucleotide 147516 of SEQ ID NO:225 [886892], respectively.

[0037] An isolated polynucleotide of the invention also can be, for example, an isolated segment of an ASIP gene, wherein nucleotides GT or AT occur at positions corresponding to nucleotide 429 of SEQ ID NO:227 [552], and nucleotide 3037 of SEQ ID NO:227 [468], respectively; an isolated segment of a DCT gene, wherein nucleotides TA or TG occur at positions corresponding to nucleotide 27427 [[451]] of SEQ ID NO:226 [710], and nucleotide 2543 of SEQ ID NO:226 [657], respectively; an isolated segment of a SILV gene wherein nucleotides TC, TT, or CC occur at positions corresponding to nucleotide 11799 of SEQ ID NO:230 [656], and nucleotide 8481 of SEQ ID NO:230 [662], respectively; an isolated segment of a TYR gene, wherein nucleotides GA, AA, or GG occur at positions corresponding to nucleotide 106523 of SEQ ID NO:231 [278], and nucleotide 107830 [[114]] of SEQ ID NO:231 [386], respectively; or an isolated segment of a TYRP1 gene, wherein nucleotides GTG, TTG, GTT occur at positions corresponding to nucleotide 15939 [[442]] of SEQ ID NO:227 [[44]] [217485], nucleotide 15939 [[442]] of SEQ ID NO:227 [[44]] [886933], and nucleotide 5463 [[442]] of SEQ ID NO:227 [[49]] [886937], respectively

[0038] In addition, an isolated polynucleotide of the invention can be, for example, an isolated segment of an ASIP gene, wherein nucleotides GA or AA occur at positions corresponding to nucleotide 1381 of SEQ ID NO:227 [559], and nucleotide 880 of SEQ ID NO:229 [560], respectively; an isolated segment of a MC1R gene, wherein nucleotides CCC, CTC, TCC, or CCT occur at positions corresponding to nucleotide 915 [[442]] of SEQ ID NO:228 [[ ]] [217438], nucleotide 1092 of SEQ ID NO:228 [217439], and nucleotide 1119 of SEQ ID NO:228 [217441], respectively; an isolated segment of an OCA2 gene, wherein nucleotides AGG or AGA occur at positions corresponding to nucleotide 210654 of SEQ ID NO:225 [712060], nucleotide 147516 of SEQ ID NO:225 [886892], and nucleotide 114307 of SEQ ID NO:225 [886896], respectively; an isolated segment of an OCA2 gene, wherein nucleotides AGT or ATT occur at positions corresponding to nucleotide 108632 of SEQ ID NO:225 [217455], nucleotide 75403 of SEQ ID NO:225 [712057], and nucleotide 141832 of SEQ ID NO:225 [886894], respectively; an isolated segment of an OCA2 gene, wherein nucleotides TG occur at positions corresponding to nucleotide 132483 of SEQ ID NO:225 [217458], and nucleotide 67333 of SEQ ID NO:225 [712056], respectively; an isolated segment of an OCA2 gene, wherein nucleotides AGG or ATT occur at positions corresponding to nucleotide 193050 of SEQ ID NO:225 [712054], and nucleotide 114220 of SEQ ID NO:225 [886895], respectively; or an isolated segment of a TYRP1 gene, wherein nucleotides AA or TA occur at positions corresponding to nucleotide 16220 of SEQ ID NO:227 [217486], and nucleotide 5463 of SEQ ID NO:227 [886937], respectively.

[0039] In one embodiment, an isolated polynucleotide of the invention is derived from the OCA2 gene and includes comprises any combination of the nucleotides AGG or AGA occur at positions corresponding to nucleotide 210654 of SEQ ID NO:225 [712060], nucleotide 147516 of SEQ ID NO:225 [886892], and nucleotide 114307 of SEQ ID NO:225 [886896], respectively; an isolated segment of an OCA2 gene, wherein nucleotides AGT or ATT occur at positions corresponding to nucleotide 108632 of SEQ ID NO:225 [217455], nucleotide 75403 of SEQ ID NO:225 [712057], and nucleotide 141832 of SEQ ID NO:225 [886894], respectively; an isolated segment of an OCA2 gene, wherein nucleotides TG occur at positions corresponding to nucleotide 132483 of SEQ ID NO:225 [217458], and nucleotide 67333 of SEQ ID NO:225 [712056], respectively; an isolated segment of an OCA2 gene, wherein nucleotides GA or AA occur at positions corresponding to nucleotide 193050 of SEQ ID NO:225 [712054], and nucleotide 114220 of SEQ ID NO:225 [886895], respectively.

[0040] The invention also relates to kits, which can be used, for example, to perform a method of the invention. Thus, in one embodiment, the invention provides a kit for identifying haplotype alleles of pigmentation-related SNPs. Such a kit can contain, for example, an oligonucleotide probe, primer, or primer pair of the invention, such oligonucleotides being useful, for example, to identify a SNP or haplotype allele as disclosed herein; or can contain one or more polynucleotides corresponding to a portion of a pigmentation, xenobiotic, or other relevant gene containing one or more nucleotide occurrences associated with a genetic pigmentation trait, with race, or with a combination thereof, such polynucleotide being useful, for example, as a standard (control) that can be examined in parallel with a test sample. In addition, a kit of the invention can contain, for example, reagents for performing a method of the invention, including, for example, one or more detectable labels, which can be used to label a probe or primer or can be incorporated into a product generated using the probe or primer (e.g., an amplification product); one or more polymerases, which can be useful for a method that includes a primer extension or amplification procedure, or other enzyme or enzymes (e.g., a ligase or an endonuclease), which can be useful for performing an oligonucleotide ligation assay or a mismatch cleavage assay; and/or one or more buffers or other reagents that are necessary to or can facilitate performing a method of the invention.

[0041] In one embodiment, a kit of the invention includes one or more primer pairs of the invention, such a kit being useful for performing an amplification reaction such as a polymerase chain reaction (PCR). Such a kit also can contain, for example, one or reagents for amplifying a polynucleotide using a primer pair of the kit. The primer pair(s) can be selected, for example, such that they can be used to determine the nucleotide occurrence of a pigmentation-related SNP, wherein a forward primer of a primer pair selectively hybridizes to a sequence of the target polynucleotide upstream of the SNP position on one strand, and the reverse primer of the primer pair selectively hybridizes to a sequence of the target polynucleotide upstream of the SNP position on a complementary strand.

[0042] In another embodiment, a kit of the invention provides a plurality of oligonucleotides of the invention, including one or more oligonucleotide probes or one or more primers, including forward and/or reverse primers, or a combination of such probes and primers or primer pairs. Such a kit provides a convenient source for selecting probe(s) and/or primer(s) useful for identifying one or more SNPs or haplotype alleles as desired. Such a kit also can contain probes and/or primers that conveniently allow a method of the invention to be performed in a multiplex format.

[0043] The invention also relates to a method for identifying a pigmentation-related SNP. Such a method can be performed, for example, by identifying a candidate SNP of a pigmentation gene or a xenobiotic metabolism gene; determining that the candidate SNP has a genotype class comprising alleles exhibiting a coherent inheritance pattern, and a minor allele frequency that is greater than 0.01 in at least one race, thereby identifying a validated SNP; and determining that the validated SNP exhibits significantly different genotype distributions and allele frequencies between individuals of different pigmentation phenotypes or racial classes, thereby identifying a pigmentation-related SNP. In addition, the invention relates to a method for identifying a race-related SNP. Such a method can be performed, for example, by identifying a candidate SNP of a pigmentation gene or a xenobiotic metabolism gene; determining that the SNP has a genotype class, a coherent pattern, and a minor allele frequency that is greater than 0.01 in at least one race, thereby identifying a validated SNP; and determining that the validated SNP exhibits significantly different genotype distributions and allele frequencies between racial classes, thereby identifying a race-related SNP. Either of such methods can further include, for example, using linear, quadratic, correspondence analysis or classification tree multivariate modeling to develop an abstract classifier incorporating one or more validated SNP or set of validated SNP that blindly generalizes to other individuals of known pigmentation or of known race, respectively.

[0044] The power of the inference drawn according to the methods of the invention is increased by using a complex classifier function. Accordingly, the invention also relates to methods that draw an inference regarding a pigmentation trait or race of a subject using a classification function. A classification function applies nucleotide occurrence information identified for a SNP or set of SNPs such as one or preferably a combination of haplotype alleles, to a set of rules to draw an inference regarding a pigmentation trait or a subject's race. In certain examples, the classifier function includes applying the pigment-related haplotype alleles to a matrix created using a feature modeling algorithm. In certain examples, classification function is a linear or quadratic classifier or performs correspondence analysis.

[0045] In one embodiment, the invention includes a method for identifying a classifier function for inferring a pigmentation-trait of a subject. The method includes: i) identifying one or more candidate SNPs of one or more pigmentation genes that have a genotype class comprising alleles exhibiting a coherent inheritance pattern, and a minor allele frequency that is greater than 0.01 in at least one race, thereby identifying one or more validated SNPs; ii) determining that the one or more validated SNPs exhibits significantly different genotype distributions and allele frequencies between individuals of different pigmentation phenotypes or racial classes, and iii) Using linear, quadratic, correspondence analysis or classification tree multivariate modeling to develop an abstract classifier function incorporating one or more validated SNPs or combinations of validated SNPs that blindly generalizes to other individuals of known pigmentation, thereby identifying a pigmentation-related classification strategy.

[0046] In another embodiment, the invention includes a method for identifying a classifier function for inferring the race of a subject. The method includes: i) identifying one or more candidate SNPs of one or more race-related genes that have a genotype class comprising alleles exhibiting a coherent inheritance pattern, and a minor allele frequency that is greater than 0.01 in at least one race, thereby identifying one or more validated SNPs; ii) determining that the one or more validated SNPs exhibits significantly different genotype distributions and allele frequencies between individuals of different pigmentation phenotypes or racial classes, and iii) Using linear, quadratic, correspondence analysis or classification tree multivariate modeling to develop an abstract classifier function incorporating one or more validated SNPs or combinations of validated SNPs that blindly generalizes to other individuals of known race, thereby identifying a classifier function for inferring the race of a subject.

[0047] In another embodiment, the invention provides a method for classifying a sample. The method includes: a) computing a variance/covariance matrix for all possible trait class pairs; b) creating a combination of class mean vectors, wherein vector components are binary encodings, correspondence analysis principal coordinates, correspondence analysis factor scores or correspondence analysis standard coordinates; c) representing a sample as an n-dimensional sample vector; and d) classifying a sample by identifying a class mean vector from the combination of class mean vectors, that is the shortest distance from the sample.

### BRIEF DESCRIPTION OF THE DRAWINGS

[0048] FIG. 1 is a cladogram or a parsimony tree showing that haplotypes observed in the human population can be expressed such that the evolutionary relationships between the haplotypes are discernable. In the diagram, lines separate haplotypes that are one mutational step from another and biallelic positions within a gene are represented in binary form (1 and 0).

[0049] FIG. 2 is a graph of the OCA2 8 haplotypes described in Example 6 herein. For simplicity the plot is in two dimensions, with a third dimension, that of the TYR_{—}3 genotype (for three classes of OCA2 haplotype pairs) shown in bold print. Each line represents a diploid set of haplotypes encoded as described in the text. Where the origin of two or more lines is located at the same coordinate position, the lines were placed next to one another to simplify presentation. For example, the 6 lines without a square or circle attached, at the upper left-hand region of the plot placed next to one another represent the same combination of OCA2 haplotypes in different individuals of brown hair color. A third dimension in the grid is the TYR_{—}3 genotype of the individuals, and this genotype is shown for three individual types in the plot (only 3 to keep the figure manageable.)

[0050] FIG. 3 shows the composite solution for predicting the natural hair color from an unknown DNA specimen (see Example 7). This particular solution correctly classified dark haired Caucasian individuals 95% of the time and light haired individuals 70% of the time.

[0051] FIG. 4 is a cladogram and clade designations for OCA3LOC109 haplotypes as described in Example 8. The haplotype is shown as a trinucleotide sequence, and the name of the haplotype appears above the sequence. Haplotypes are related to one another in the cladogram by step-wise mutations indicated by the altered nucleotide on either side of the bi-directional arrows. Two-step clade designations (II=1, II=2) are shown above the dashed line at the top of the figure.

[0052] FIG. 5 is a cladogram and clade designations for OCA3LOC920 haplotypes as indicated in Example 8. The haplotype is shown as a trinucleotide sequence, and the name of the haplotype appears above the sequence. Haplotypes are related to one another in the cladogram by step-wise mutations indicated by the altered nucleotide on either side of the bi-directional arrows. Two-step clade designations (II=1, II=2) are shown above the dashed line at the top of the figure.

[0053] FIG. 6 is a cladogram for OCA2 haplotypes, as described in Example 11.

[0054] FIG. 7 is cladogram for OCA3LOC922, as described in Example 11.

[0055] FIG. 8 is cladogram for OCA3LOC922, as described in Example 11.

### DETAILED DESCRIPTION OF THE INVENTION

[0056] The invention relates to methods for inferring a genetic pigmentation trait of a mammalian subject from a nucleic acid sample or a polypeptide sample of the subject, and compositions for practicing such methods. The methods of the invention are based, in part, on the identification of single nucleotide polymorphisms (SNPs) that, alone or in combination, allow an inference to be drawn as to a genetic pigmentation trait such as hair shade, hair color, eye shade, or eye color, and further allow an inference to be drawn as to race. As such, the compositions and methods of the invention are useful, for example, as forensic tools for obtaining information relating to physical characteristics of a potential crime victim or a perpetrator of a crime from a nucleic acid sample present at a crime scene, and as tools to assist in breeding domesticated animals, livestock, and the like to contain a pigmentation trait as desired.

[0057] In one aspect, the invention provides a method for inferring a genetic pigmentation trait of a mammalian subject from a biological sample of the subject by identifying in the biological sample at least one pigmentation-related haplotype allele of at least one pigmentation gene. The pigmentation gene can be oculocutaneous albinism II (OCA2), agouti signaling protein (ASIP), tyrosinase-related protein 1 (TYRP1), tyrosinase (TYR), adaptor-related protein complex 3, beta 1 subunit (AP3B1) (also known as adaptin B1 protein (ADP1)), adaptin 3 D subunit 1 (AP3D1), dopachrome tautomerase (DCT), silver homolog (SILV), AIM-1 protein (LOC51151), proopiomelanocortin (POMC), ocular albinism 1 (OA1), microphthalmia-associated transcription factor (MITF), myosin VA (MYO5A), RAB27A, or coagulation factor II (thrombin) receptor-like 1 (F2RL1. The haplotype allele of the penetrant pigmentation-related haplotype is associated with the pigmentation trait, thereby allowing an inference to be drawn regarding the genetic pigmentation trait of the subject.

[0058] As disclosed herein, the identification of at least one penetrant pigmentation-related haplotype allele of at least one pigmentation gene allows an inference to be drawn as to a genetic pigmentation trait of a mammalian subject. An inference drawn according to a method of the invention can be strengthened by identifying a second, third, fourth or more penetrant pigmentation related haplotype alleles and/or one or more latent pigmentation related haplotype alleles in the same pigmentation gene or in one or more other genes. Accordingly, the method can further include identifying in the nucleic acid sample at least one pigmentation-related haplotype allele of at least a second pigmentation gene. The second pigmentation gene can be OCA2, ASIP, TYRP1, TYR, AP3B1, AP3D1, DCT, SILV, LOC51151, POMC, OA1, MITF, MY05A, RAB27A, F2RL1, or melanocortin-1 receptor (MCV1R), or any combination of these genes.

[0059] By way of example, the pigmentation gene for this aspect of the invention can include at least one of OCA2, ASIP, TYRP1, TYR, SILV AP3B1, AP3D1, or DCT. As disclosed in the Examples included herein, such as Examples 17 and 18, penetrant and/or latent haplotypes and haplotype alleles for these genes are provided. In certain embodiments, the pigmentation-related haplotype allele is a penetrant pigmentation-related haplotype allele. By way of example, where the pigmentation-related haplotype allele is a penetrant pigmentation-related haplotype allele, the pigmentation trait can be eye shade, eye color, hair shade, or hair color. Furthermore, where the pigmentation trait is eye shade or eye color the pigmentation-related haplotype allele can occur in at least one of OCA2, TYRP1, or DCT. Penetrant haplotypes for eye color inference from these genes are identified herein (see Example 17).

[0060] As used herein, the term “at least one”, when used in reference to a gene, SNP, haplotype, or the like, means 1, 2, 3, 4, 5, 6, 7, 8, 9, 10, etc., up to and including all of the exemplified pigmentation-related haplotype alleles, pigmentation genes, or pigmentation-related SNPs. Reference to “at least a second” gene, SNP, or the like, for example, a pigmentation gene, means two or more, i.e., 2, 3, 4, 5, 6, 7, 8, 9, 10, etc., pigmentation genes.

[0061] The term “haplotypes” as used herein refers to groupings of two or more nucleotide SNPs present in a gene. The term “haplotype alleles” as used herein refers to a non-random combination of nucleotide occurrences of SNPs that make up a haplotype. Haplotype alleles are much like a string of contiguous sequence bases, except the SNPs are not adjacent to one another on a chromosome. For example, the SNPs OCA2_{—}5 and OCA2_{—}8 can be included as part of the same haplotype, but they are about 60,000 base pairs apart from one another.

[0062] “Penetrant pigmentation-related haplotype alleles” are haplotype alleles whose association with a pigmentation trait is strong enough that it can be detected using simple genetics approaches. Corresponding haplotypes of penetrant pigmentation-related haplotype alleles, are referred to herein as “penetrant pigmentation-related haplotypes.” Similarly, individual nucleotide occurrences of SNPs are referred to herein as “penetrant pigmentation-related SNP nucleotide occurrences” if the association of the nucleotide occurrence with a pigmentation trait is strong enough on its own to be detected using simple genetics approaches, or if the SNP loci for the nucleotide occurrence make up part of a penetrant haplotype. The corresponding SNP loci are referred to herein as “penetrant pigmentation-related SNPs.” Haplotype alleles of penetrant haplotypes are also referred to herein as “penetrant haplotype alleles” or “penetrant genetic features.” Penetrant haplotypes are also referred to herein as “penetrant genetic feature SNP combinations.”

[0063] Latent pigmentation-related haplotype alleles are haplotype alleles that, in the context of one or more penetrant haplotypes, strengthen the inference of the genetic pigmentation trait. Latent pigmentation-related haplotype alleles are typically alleles whose association with a pigmentation trait is not strong enough to be detected with simple genetics approaches. Latent pigmentation-related SNPs are individual SNPs that make up latent pigmentation-related haplotypes. As disclosed in Example 17, latent pigmentation-related SNPs show unusual minor allele frequency differences between Caucasians and Africans/Asians combined. Therefore, it will be recognized that, based on the teachings disclosed herein, additional latent pigmentation-related SNPs can be identified using routine methods.

[0064] Table 1 identifies and provides information regarding SNPs disclosed herein that are preferentially associated with eye pigmentation and/or hair pigmentation. All of the SNPs of the methods and compositions of the invention have nucleotide occurrences that preferentially segregate for hair shade or eye shade. Table 1 sets out the marker number, a SEQ ID NO: for the SNP and surrounding nucleotide sequences in the genome, and the position of the SNP within the sequence listing entry for that SNP and surrounding sequences. From this information, the SNP loci can be identified within the human genome.

TABLE 1
Exemplary Race-Related and/or Pigmentation-Related SNPs

| | | POSITION OF | SEQ ID NO. OF | POSITION OF | POSITION OF |
|---|---|---|---|---|---|
| | | SNP IN | GENOMIC | MARKER IN | SNP IN |
| SEQ ID NO. | | MARKER SEQ | CONTAINING | GENOMIC SEQ | GENOMIC SEQ |
| OF MARKET | MARKER | ID | MARKER | ID | ID |
| 1 | 702 | 609 | 226 | 26977-28268 | 27585 |
| 2 | 650 | 501 | 226 | 7798-8798 | 8298 |
| 3 | 675 | 256 | 226 | 31831-32460 | 32086 |
| 4 | 217438 | 442 | 228 | 474-1743 | 915 |
| 5 | 217439 | 619 | 228 | 474-1743 | 1092 |
| 6 | 217441 | 646 | 228 | 474-1743 | 1119 |
| 7 | 217458 | 135 | 225 | 132349-132783 | 132483 |
| 8 | 886894 | 193 | 225 | 141640-141989 | 141832 |
| 9 | 886895 | 228 | 225 | 113993-114412 | 114220 |
| 10 | 886896 | 245 | 225 | 114063-114482 | 114307 |
| 11 | 217452 | 189 | 225 | 84167-84678 | 84355 |
| 12 | 712052 | 573 | 225 | 417994-419276 | 418566 |
| 13 | 886994 | 245 | 225 | 112803-113226 | 113047 |
| 14 | 712057 | 643 | 225 | 74761-76160 | 75403 |
| 15 | 712058 | 539 | 225 | 143826-144932 | 144364 |
| 16 | 712060 | 418 | 225 | 210237-211151 | 210654 |
| 17 | 712064 | 795 | 225 | 146570-148319 | 147364 |
| 18 | 712054 | 535 | 225 | 192516-193547 | 193050 |
| 19 | 712056 | 554 | 225 | 66780-67689 | 67333 |
| 20 | 886892 | 210 | 225 | 147307-147726 | 147516 |
| 21 | 217455 | 225 | 225 | 108408-108860 | 108632 |
| 22 | 712061 | 170 | 225 | 108514-109419 | 108680 |
| 23 | 886938 | 172 | 227 | 11188-11537 | 11359 |
| 24 | 886943 | 216 | 227 | 14688-15107 | 14903 |
| 25 | 560 | 61 | 229 | 820-940 | 880 |
| 26 | 552 | 201 | 229 | 229-629 | 429 |
| 27 | 559 | 201 | 229 | 1181-1581 | 1381 |
| 28 | 468 | 201 | 229 | 2837-3237 | 3037 |
| 29 | 657 | 356 | 226 | 2188-2727 | 2543 |
| 30 | 674 | 599 | 226 | 11166-11801 | 11764 |
| 31 | 632 | 267 | 226 | 28851-29531 | 29117 |
| 32 | 701 | 61 | 226 | 4209-4329 | 4269 |
| 33 | 710 | 451 | 226 | 26977-28268 | 27427 |
| 34 | 217456 | 326 | 225 | 13761-114387 | 114086 |
| 35 | 656 | 61 | 230 | 11739-11859 | 11799 |
| 36 | 662 | 61 | 230 | 8421-8541 | 8481 |
| 37 | 637 | 61 | 230 | 8639-8759 | 8699 |
| 38 | 278 | 93 | 231 | 106431-106855 | 106523 |
| 39 | 386 | 114 | 231 | 107717-108076 | 107830 |
| 40 | 217480 | 558 | 231 | 117507-118412 | 118064 |
| 41 | 951497 | 221 | 231 | 50355-50774 | 50575 |
| 42 | 217468 | 660 | 231 | 421-1326 | 1080 |
| 43 | 217473 | 163 | 231 | 107180-107659 | 107348 |
| 44 | 217485 | 364 | 227 | 15576-16386 | 15939 |
| 45 | 217486 | 473 | 227 | 15748-16743 | 16220 |
| 46 | 869787 | 314 | 227 | 771-1330 | 1084 |
| 47 | 869745 | 224 | 227 | 1-490 | 224 |
| 48 | 886933 | 169 | 227 | 4830-5179 | 4998 |
| 49 | 886937 | 214 | 227 | 5250-5669 | 5463 |
| 50 | 886942 | 903 | 227 | 13918-15596 | 14820 |
| 51 | 217459 | 207 | | | |
| 52 | 217460 | 428 | | | |
| 53 | 217487 | 422 | | | |
| 54 | 217489 | 459 | | | |
| 55 | 554353 | 1528 | | | |
| 56 | 554363 | 1093 | | | |
| 57 | 554368 | 1274 | | | |
| 58 | 554370 | 1024 | | | |
| 59 | 554371 | 1159 | | | |
| 60 | 615921 | 484 | | | |
| 61 | 615925 | 619 | | | |
| 62 | 615926 | 551 | | | |
| 63 | 664784 | 1177 | | | |
| 64 | 664785 | 1185 | | | |
| 65 | 664793 | 1421 | | | |
| 66 | 664802 | 1466 | | | |
| 67 | 664803 | 1311 | | | |
| 68 | 712037 | 808 | | | |
| 69 | 712047 | 1005 | | | |
| 70 | 712051 | 743 | | | |
| 71 | 712055 | 418 | | | |
| 72 | 712059 | 884 | | | |
| 73 | 712043 | 744 | | | |
| 74 | 756239 | 360 | | | |
| 75 | 756251 | 455 | | | |
| 76 | 809125 | 519 | | | |
| 77 | 869769 | 277 | | | |
| 78 | 869772 | 227 | | | |
| 79 | 869777 | 270 | | | |
| 80 | 869784 | 216 | | | |
| 81 | 869785 | 172 | | | |
| 82 | 869794 | 176 | | | |
| 83 | 869797 | 145 | | | |
| 84 | 869798 | 164 | | | |
| 85 | 869802 | 166 | | | |
| 86 | 869809 | 213 | | | |
| 87 | 869810 | 218 | | | |
| 88 | 869813 | 157 | | | |
| 89 | 886934 | 837 | | | |
| 90 | 886993 | 229 | | | |
| 91 | 951526 | 160 | | | |

[0065] Data regarding the nucleotide occurrences at many of these SNPs in hair color or eye color can be found in Tables 9-1 and 18-1, for eye shade and hair shade, respectively. Additionally, Tables 9-1 and 18-1 include the name and marker numbers for the SNPs identified as pigmentation-related and/or race-related herein, justifications explaining the association between a SNP and a pigmentation trait, as well as the name and Genbank accession number of the gene from which a SNP occurs.

[0066] Polymorphisms are allelic variants that occur in a population. The polymorphism can be a single nucleotide difference present at a locus, or can be an insertion or deletion of one or a few nucleotides. As such, a single nucleotide polymorphism (SNP) is characterized by the presence in a population of one or two, three or four nucleotides (i.e., adenosine, cytosine, guanosine or thymidine) at a particular locus in a genome such as the human genome. Accordingly, it will be recognized that, while the methods of the invention are exemplified primarily by the detection of SNPs, the disclosed methods or others known in the art similarly can be used to identify other polymorphisms in the exemplified or other pigmentation-related and/or race-related genes.

[0067] Simple genetic approaches for discovering penetrant pigmentation-related haplotype alleles include analyzing allele frequencies in populations with different phenlotypes for a pigmentation trait being analyzed, to discover those haplotypes that occur more or less frequently in individuals with a certain pigmentation trait phenotype, for example, blue eyes. In such simple genetics methods SNP nucleotide occurrences in different pigmentation traits, such as eye shade or hair shade, are scored and distribution frequencies, such as those shown in Tables 9-1 and 18-1 are analyzed. The Examples provide illustrations of using simple genetics approaches to discover penetrant haplotypes, and disclose methods that can be used to discover other pigmentation-related haplotype and their alleles, and, therefore, pigmentation-related SNPs that make up the pigmentation-related haplotypes.

[0068] Haplotypes can be inferred from genotype data corresponding to certain SNPs using the Stephens and Donnelly algorithm (Am. J. Hum. Genet. 68:978-989, 2001). Haplotype phases (i.e., the particular haplotype alleles in an individual) can also be determined using the Stephens and Donnelly algorithm (Am. J. Hum. Genet. 68:978-989, 2001). Software programs are available which perform this algorithm (e.g., The PHASE program, Department of Statistics, University of Oxford).

[0069] In one example, called the Haploscope method (See U.S. patent application Ser. No. 10/120,804 entitled “METHOD FOR THE IDENTIFICATION OF GENETIC FEATURES FOR COMPLEX GENETICS CLASSISFIERS,” filed Apr. 11, 2002) a candidate SNP combination is selected from a plurality of candidate SNP combinations for a gene associated with a genetic trait. Haplotype data associated with this candidate SNP combination are read for a plurality of individuals and grouped into a positive-responding group and a negative-responding group based on whether predetermined trait criteria for an individual are met. A statistical analysis (as discussed below) on the grouped haplotype data is performed to obtain a statistical measurement associated with the candidate SNP combination. The acts of selecting, reading, grouping, and performing are repeated as necessary to identify the candidate SNP combination having the optimal statistical measurement. In one approach, all possible SNP combinations are selected and statistically analyzed. In another approach, a directed search based on results of previous statistical analysis of SNP combinations is performed until the optimal statistical measurement is obtained. In addition, the number of SNP combinations selected and analyzed may be reduced based on a simultaneous testing procedure.

[0070] As used herein, the term “infer” or “inferring”, when used in reference to a genetic pigmentation trait or race, means drawing a conclusion about a pigmentation trait or about the race of a subject using a process of analyzing individually or in combination nucleotide occurrence(s) of one or more pigmentation-related or race-related SNP(s) in a nucleic acid sample of the subject, and comparing the individual or combination of nucleotide occurrence(s) of the SNP(s) to known relationships of nucleotide occurrence(s) of the pigmentation-related or race-related SNP(s). As disclosed herein, the nucleotide occurrence(s) can be identified directly by examining nucleic acid molecules, or indirectly by examining a polypeptide encoded by a particular gene, for example, an OCA2 gene, wherein the polymorphism is associated with an amino acid change in the encoded polypeptide.

[0071] Methods of performing such a comparison and reaching a conclusion based on that comparison are exemplified herein (see Example 17). The inference typically, involves using a complex model that involves using known relationships of known alleles or nucleotide occurrences as classifiers. As illustrated in Example 17, the comparison can be performed by applying the data regarding the subject's pigmentation-related haplotype allele(s) to a complex model that makes a blind, quadratic discriminate classification using a variance-covariance matrix. Various classification models are discussed in more detail herein, and illustrated in the Examples.

[0072] To determine whether haplotypes are useful in an inference of a pigmentation trait, numerous statistical analysis can be performed. Allele frequencies can be calculated for haplotypes and pair-wise haplotype frequencies estimated using an EM algorithm (Excoffier and Slatkin, Mol Biol Evol. 1995 September;12(5):921-7). Linkage disequilibrium coefficients can then be calculated. In addition to various parameters such as linkage disequilibrium coefficients, allele and haplotype frequencies (within ethnic, control and case groups), chi-square statistics and other population genetic parameters such as Panmitic indices can be calculated to control for ethnic, ancestral or other systematic variation between the case and control groups.

[0073] Markers/haplotypes with value for distinguishing the case matrix from the control, if any, can be presented in mathematical form describing any relationship and accompanied by association (test and effect) statistics. A statistical analysis result which shows an association of a SNP marker or a haplotype with a pigmentation trait with at least 80%, 85%, 90% 95%, or 99%, most preferably 95% confidence, or alternatively a probability of insignificance less than 0.05, can be used to identify penetrant haplotypes, as illustrated in Example 17. These statistical tools may test for significance related to a null hypothesis that an on-test SNP allele or haplotype allele is not significantly different between the groups. If the significance of this difference is low, it suggests the allele is not related to the a pigmentation trait. The discovery of penetrant haplotype alleles can be verified and validated as genetic features for pigmentation using a nested contingency analysis of haplotype cladograms, as illustrated in Example 17.

[0074] It is beneficial to express polymorphisms in terms of multi-locus haplotypes because, as disclosed in the Examples provided herein, far fewer haplotypes exist in the world population than would be predicted based on the expectations from random allele combinations. For example, as disclosed in Example 2, for the three disclosed polymorphic loci within the OCA2 gene, OCA2_{—}5 (G/A), OCA2_{—}8 (T/C), and OCA2_{—}6 (G/A), there would be 23-8 possible haplotype combinations observed in the population—ATG, ACG, GCG, GTG, ACA, GCA, ATA and GTA. With the first letter in each haplotype allele corresponding to the first SNP, OCA2_{—}5, the second letter corresponding to the nucleotide occurrence of the second SNP (OCA2_{—}5) in the haplotype, and the third letter corresponding to the nucleotide occurrence of the third SNP (OCA2_{—}8) of the haplotype. The various haplotype alleles exemplified above can be considered possible or potential “flavors” of the OCA2 gene in the population. However, for the OCA2 SNPs listed above, four haplotypes or “flavors” have been observed in real data from people of the world-ATG, ACG, GCG and GCA. The observance of a number of haplotypes in nature that is far fewer than the number of haplotypes possible is common and appreciated as a general principle among those familiar with the state of the art, and it is commonly accepted that haplotypes offer enhanced statistical power for genetic association studies. This phenomenon is caused by systematic genetic forces such as population bottlenecks, random genetic drift, selection, and the like, which have been at work in the population for millions of years, and have created a great deal of genetic “pattern” in the present population. As a result, working in terms of haplotypes offers a geneticist greater statistical power to detect associations, and other genetic phenomena, than working in terms of disjointed genotypes. For larger numbers of polymorphic loci the disparity between the number of observed and expected haplotypes is larger than for smaller numbers of loci. The various haplotype alleles exemplified above can be considered as all possible or potential “flavors” of the OCA2 gene in the population. However, for the OCA2 SNPs listed above, only four haplotypes or “flavors” have been observed thus far in real data from people of the world. For larger numbers of polymorphic loci the disparity between the number of observed and expected haplotypes can be larger. Such a phenomenon is caused, in part, by systematic genetic forces such as population bottlenecks, random genetic drift, selection, and the like, which have been at work in the population for millions of years, and have created a great deal of genetic “pattern” in the present population. As a result, working in terms of haplotypes offers a geneticist greater statistical power to detect associations, and other genetic phenomena, than does working in terms of disjointed genotypes.

[0075] In diploid organisms such as humans, somatic cells, which are diploid, include two alleles for each haplotype. As such, in some cases, the two alleles of a haplotype are referred to herein as a genotype, and the analysis of somatic cells, such as skin cells obtained at a crime scene, typically identifies the alleles for each copy of the haplotype. These alleles can be identical (homozygous) or can be different (heterozygous). The haplotypes of a subject can be symbolized by representing alleles on the top and bottom of a slash (e.g., ATG/CTA or GTT/AGA), where the sequence on the top of the slash represents the combination of polymorphic alleles on the maternal chromosome and the other, the paternal (or vice versa). Although the methods of the invention are illustrated using analysis of diploid cells (see Examples), the analysis similarly can be applied to haploid cells, such as sperm cells. When using haploid sequences, the contingency table from a population study that is used to derive the factor scores for quadratic discrimination, becomes a table of haploid sequences versus pigmentation classes. The dimensionality of the problem is lower, and therefore the classifications more simple, accomplished faster, and are slightly more accurate. Thus the variance-covariance matrix takes on a slightly different form, but is generally the same.

[0076] As disclosed herein, the power of the inference of a pigmentation trait can be improved using specific combinations of haplotypes, including penetrant and latent haplotypes. As shown, for example, in Example 17, such combinations improve the accuracy of an inference drawn according to a method of the invention. This result is not unreasonable in view, for example, of genetic epistasis, wherein specific combinations of genes have unique impacts on traits.

[0077] The methods and compositions of the invention allow complex genomics solutions for eye, hair, and skin pigmentation and, therefore, provide numerous utilities. For example, the methods and compositions are useful as forensic tools in human subjects. Pigmentation solutions for eye color also can have relevance for pigmentation related disease research focused, for example, on cataracts (Cumming et al., Am. J. Opthalmol. 130:237-238, 2000), late-onset blindness, and melanoma (Brogelli et al., Br. J. Dermatol. 125: 349-52, 1991; Palmer et al., Am. J. Hum. Genet. 66:176-86, 2000).

[0078] A sample useful for practicing a method of the invention can be any biological sample of a subject that contains nucleic acid molecules, including portions of the gene sequences to be examined, or corresponding encoded polypeptides, depending on the particular method. As such, the sample can be a cell, tissue or organ sample, or can be a sample of a biological fluid such as semen, saliva, blood, and the like. A nucleic acid sample useful for practicing a method of the invention will depend, in part, on whether the SNPs of the haplotype to be identified are in coding regions or in non-coding regions. Thus, where at least one of the SNPs to be identified is in a non-coding region, the nucleic acid sample generally is a deoxyribonucleic acid (DNA) sample, particularly genomic DNA or an amplification product thereof. However, where heteronuclear ribonucleic acid (RNA), which includes unspliced mRNA precursor RNA molecules, is available, a cDNA or amplification product thereof can be used. Where the each of the SNPs of the haplotype is present in a coding region of the pigmentation gene(s), the nucleic acid sample can be DNA or RNA, or products derived therefrom, for example, amplification products. Furthermore, while the methods of the invention generally are exemplified with respect to a nucleic acid sample, it will be recognized that particular haplotype alleles can be in coding regions of a gene and can result in polypeptides containing different amino acids at the positions corresponding to the SNPs due to non-degenerate codon changes. As such, in another aspect, the methods of the invention can be practiced using a sample containing polypeptides of the subject.

[0079] Methods of the invention can be practiced with respect to human subjects and, therefore, can be particularly useful for forensic analysis. In a forensic application or a method of the invention, the human nucleic acid sample can be obtained from a crime scene, using well established sampling methods. Thus, the sample can be fluid sample or a swab sample For example, the sample can be a swab sample, blood stain, semen stain, hair follicle, or other biological specimen, taken from a crime scene, or can be a soil sample suspected of containing biological material of a potential crime victim or perpetrator, can be material retrieved from under the finger nails of a potential crime victim, or the like, wherein nucleic acids (or polypeptides) in the sample can be used as a basis for drawing an inference as to a pigmentation trait according to a method of the invention.

[0080] A mammalian subject that can be examined according to a method of the invention can be any mammalian species. In particular, the methods are applicable to drawing an inference as to a pigmentation trait of a human subject. The human subject can be from a general population of mixed ethnicity, or the human subject can be of a particular ethnic background or race. For example, the subject can be a Caucasian.

[0081] By way of example, a method of the invention can be performed using a biological sample from a human subject, the genetic pigmentation trait to be inferred can be eye color or eye shade, and the penetrant pigmentation-related haplotype allele can be from at least one of the following pigmentation-related haplotypes:
[0082] a) nucleotides of the DCT gene corresponding to a DCT-A haplotype, which includes, nucleotide 27585 of SEQ ID NO:226 [702], nucleotide 8298 of SEQ ID NO:226 [650], and nucleotide 32086 of SEQ ID NO:226 [marker 675];
[0083] b) nucleotides of the MC1R gene corresponding to a melanocortin-1 receptor (MC1R)-A haplotype, which includes nucleotide 915 of SEQ ID NO:228 [217438], nucleotide 1092 of SEQ ID NO:228 [217439], and nucleotide 1119 of SEQ ID NO:228 [217441];
[0084] c) nucleotides of the OCA2 gene, corresponding to an OCA2-A haplotype, which includes nucleotide 132483 of SEQ ID NO:225 [217458], nucleotide 141832 of SEQ ID NO:225 [886894], nucleotide 114220 of SEQ ID NO:225 [marker 886895], and nucleotide 114307 of SEQ ID NO:225 [marker 886896];
[0085] d) nucleotides of the OCA2 gene, corresponding to an OCA2-B haplotype, which includes nucleotide 84355 of SEQ ID NO:225 [[marker 217452]], nucleotide 418566 of SEQ ID NO:225 [marker 712052], and nucleotide 113047 of SEQ ID NO:225 [marker 886994];
[0086] e) nucleotides of the OCA2 gene, corresponding to an OCA2-C haplotype, which includes nucleotide 75403 of SEQ ID NO:225 [712057], nucleotide 144364 of SEQ ID NO:225 [712058], nucleotide 210654 of SEQ ID NO:225 [712060], and nucleotide 147364 of SEQ ID NO:225, [712064];
[0087] f) nucleotides of the OCA2 gene, corresponding to an OCA2-D haplotype, which includes nucleotide 193050 of SEQ ID NO:225, [712054], nucleotide 67333 of SEQ ID NO:225, [712056], and nucleotide 147516 of SEQ ID NO:225, [886892];
[0088] g) nucleotides of the OCA2 gene, corresponding to an OCA2-E haplotype, which includes nucleotide 108632 of SEQ ID NO:225, [217455], nucleotide 108680 of SEQ ID NO:225, [712061], and nucleotide 147516 of SEQ ID NO:225, [886892]; or
[0089] h) nucleotides of the TYRP1 gene corresponding to a TYRP1-B haplotype which includes: nucleotide 11359 of SEQ ID NO:227, [886938], and nucleotide 14903 of SEQ ID NO:227; [886943], or any combination of a) through h). The above listed haplotypes provide preferred penetrant pigmentation-related haplotypes for eye pigmentation (see Example 17). To improve the power of the inference, the pigmentation-related haplotype can be all of the above listed pigmentation-related haplotypes.

[0090] This list of penetrant pigmentation-related SNPs are preferred penetrant pigmentation-related SNPs for eye color, as illustrated in Example 17.

[0091] It will be recognized by one skilled in the art that the invention includes any 1 of the pigmentation-related haplotypes, alone, or any combination of 2, 3, 4, or more, including, for example all 8 pigmentation-related haplotypes listed above.

[0092] A method of the invention, which can include methods wherein the pigmentation-related haplotype alleles are determined for the preferred penetrant pigmentation-related haplotypes for eye pigmentation, the subject is a human, and the genetic pigmentation trait is eye color or eye shade, can further include identifying in the nucleic acid sample a nucleotide occurrence of at least one latent pigmentation-related SNP of a pigmentation gene, thereby improving the power of the inference of eye color or eye shade. The latent pigmentation-related SNP can be, for example, one or more of nucleotide 880 of SEQ ID NO:229 [marker 560], nucleotide 429 of SEQ ID NO:227 [marker 552], nucleotide 1381 of SEQ ID NO:227 [marker 559], nucleotide 3037 of SEQ ID NO:227 [marker 468], nucleotide 2543 of SEQ ID NO:226 [marker 657], nucleotide 11764 of SEQ ID NO:226 [marker 674], nucleotide 29117 of SEQ ID NO:226 [marker 632], nucleotide 4269 of SEQ ID NO:226 [marker 701], nucleotide 27427 of SEQ ID NO:226 [marker 710]; nucleotide 114086 of SEQ ID NO:225 [marker 217456], nucleotide 11799 of SEQ ID NO:230 [marker 656], nucleotide 8481 of SEQ ID NO:230, nucleotide 8699 of SEQ ID NO:230 [marker 637], nucleotide 106523 of SEQ ID NO:231 [marker 278], nucleotide 107830 of SEQ ID NO:231 [marker 386], nucleotide 118064 of SEQ ID NO:231 [marker 217480], nucleotide 50575 of SEQ ID NO:231 [marker 951497], nucleotide 1080 of SEQ ID NO:231 [marker 217468], nucleotide 107348 of SEQ ID NO:231 [marker 217473], nucleotide 15939 of SEQ ID NO:227 [marker 217485], nucleotide 16220 of SEQ ID NO:227 [marker 217486], nucleotide 1084 of SEQ ID NO:227 [marker 869787], nucleotide 224 of SEQ ID NO:227 [marker 869745], nucleotide 4998 of SEQ ID NO:227 [marker 886933], nucleotide 5463 of SEQ ID NO:227 [marker 886937], or nucleotide 14820 of SEQ ID NO:227; [886942], or any combination thereof. The above-listed latent pigmentation-related SNPs provide preferred latent pigmentation-related SNPs related to eye color (see Example 17). According to this aspect of a method of the invention, latent pigmentation-related haplotype allele can be:
[0093] i) nucleotides of the ASIP gene corresponding to an ASIP-A haplotype, which includes nucleotide 429 of SEQ ID NO:227 [marker 552], and nucleotide 3037 of SEQ ID NO:227 [marker 468];
[0094] j) nucleotides of the DCT gene corresponding to a DCT-B haplotype, which includes nucleotide 27427 of SEQ ID NO:226 [marker 710], and nucleotide 2543 of SEQ ID NO:226 [marker 657];
[0095] k) nucleotides of the SILV gene corresponding to a SILV-A haplotype, which includes nucleotide 11799 of SEQ ID NO:230 [marker 656], and nucleotide 8481 of SEQ ID NO:230;
[0096] l) nucleotides of the TYR gene corresponding to a TYR-A haplotype, which includes nucleotide 106523 of SEQ ID NO:231 [marker 278], and nucleotide 107830 of SEQ ID NO:231 [marker 386]; or
[0097] m) nucleotides of the TYRP1-A gene corresponding to a TYRP1-A haplotype, which includes nucleotide 15939 of SEQ ID NO:227 [marker 217485], nucleotide 4998 of SEQ ID NO:227 [marker 886933], and nucleotide 5463 of SEQ ID NO:227 [marker 886937], or any combination of i) through m).

[0098] Further according to this aspect of a method of the invention, wherein the pigmentation-related haplotype alleles are determined for the preferred penetrant pigmentation-related haplotypes for eye pigmentation, the subject is a human, and the genetic pigmentation trait is eye color or eye shade, the method can further include identifying in the nucleic acid sample all of the above listed following latent haplotypes.

[0099] In one embodiment, the penetrant pigmentation-trait related haplotypes for eye color can be one or more of the following:
[0100] a) the MC1R-A haplotype allele CCC;
[0101] b) the OCA2-A haplotype allele TTAA, CCAG, or TTAG;
[0102] c) the OCA2-B haplotype allele CAA, CGA, CAC, or CGC;
[0103] d) the OCA2-C haplotype allele GGAA, TGAA, or TAAA;
[0104] e) the OCA2-D haplotype allele AGG or GGG;
[0105] f) the OCA2-E haplotype allele GCA;
[0106] g) the TYRP1-B haplotype allele TC; and
[0107] h) the DCT-B haplotype allele CTG, or GTG.

[0108] These alleles are preferred penetrant pigmentation-related haplotype alleles for eye color, as illustrated in Example 17.

[0109] In a preferred example with high inference power, the method of the invention wherein the pigmentation-related haplotype alleles are determined for the preferred penetrant pigmentation-related haplotypes for eye color or eye shade, the subject is a human, and the genetic pigmentation trait is eye color or eye shade, further include the following penetrant pigmentation-trait related haplotype alleles:
[0110] a) the MC1R-A haplotype allele CCC;
[0111] b) the OCA2-A haplotype allele TTAA, CCAG, or TTAG;
[0112] c) the OCA2-B haplotype allele CAA, CGA, CAC, or CGC;
[0113] d) the OCA2-C haplotype allele GGAA, TGAA, or TAAA;
[0114] e) the OCA2-D haplotype allele AGG or GGG;
[0115] f) the OCA2-E haplotype allele GCA;
[0116] g) the TYRP1-B haplotype allele TC; and
[0117] h) the DCT-B haplotype allele CTG, or GTG;
   and the following latent pigmentation-related haplotype alleles:
[0118] i) the ASIP-A haplotype allele GT or AT;
[0119] j) the DCT-B haplotype allele TA or TG;
[0120] k) the SILV-A haplotype allele TC, TT, or CC;
[0121] l) the TYR-A haplotype allele GA, AA or GG; and
[0122] m) the TYRP1-A haplotype allele GTG, TTG, or GTT.

[0123] The alleles listed in the preceding paragraph represent the group of penetrant and latent pigmentation-related haplotypes that are identified in Example 17. This combination of haplotypes when used to infer eye pigmentation using the classification model disclosed in Example 17, inferred eye shade for a group of 225 Caucasians with 99% accuracy for the inference of iris color shade, and 97% accuracy for the inference of actual eye colors.

[0124] In another aspect, the invention provides a method for inferring eye shade or color of a human subject from a biological sample of the subject by performing a nested contingency analysis of haplotypes. The method includes performing the steps described in Table 17-4.

[0125] In another aspect, the invention provides a method for inferring hair color or hair shade of a mammalian subject from a biological sample of the subject by identifying in the biological sample at least one pigmentation-related haplotype allele of at least one pigmentation gene. The biological sample can be (or contain) a nucleic acid sample. The pigmentation-related haplotype preferably includes a penetrant pigmentation-related haplotype. For example, where the pigmentation-related haplotype allele is a penetrant pigmentation-related haplotype allele, the penetrant pigmentation-related haplotype allele can occur in at least one of the OCA2, ASIP, TYRP1, or MC1R gene. To improve the power of the inference, a combination of penetrant pigmentation-related haplotype alleles from OCA2, ASIP, TYRP1 and MC1R can be identified, with exemplary penetrant haplotypes related to an inference of hair color or hair shade set forth in Example 18.

[0126] A method inferring hair color or hair shade can be performed using a biological sample from a human subject, and the penetrant pigmentation-related haplotype allele can occur in at least one pigmentation-related haplotypes, as follows:
[0127] a) nucleotides of the ASIP-B haplotype corresponding to:
   [0128] nucleotide 1381 of SEQ ID NO:227, [559], and
   [0129] nucleotide 880 of SEQ ID NO:229, [560]
[0130] b) nucleotides of the MC1R-A haplotype corresponding to:
[0131] nucleotide 915 of SEQ ID NO:228, [217438],
   [0132] nucleotide 1092 of SEQ ID NO:228 [217439], and
   [0133] nucleotide 1119 of SEQ ID NO:228 [217441];
[0134] c) nucleotides of the OCA2-G haplotype corresponding to:
   [0135] nucleotide 210654 of SEQ ID NO:225 [712060],
   [0136] nucleotide 147516 of SEQ ID NO:225, [886892], and
   [0137] nucleotide 114307 of SEQ ID NO:225 [marker 886896];
[0138] d) nucleotides of the OCA2-H haplotype corresponding to:
   [0139] nucleotide 108632 of SEQ ID NO:225, [217455],
   [0140] nucleotide 75403 of SEQ ID NO:225 [712057], and
   [0141] nucleotide 141832 of SEQ ID NO:2258 [886894];
[0142] e) nucleotides of the OCA2-I haplotype corresponding to:
   [0143] nucleotide 132483 of SEQ ID NO:225 [217458], and
   [0144] nucleotide 67333 of SEQ ID NO:225, [712056];
[0145] f) nucleotides of the OCA2-J haplotype corresponding to:
   [0146] nucleotide 193050 of SEQ ID NO:225, [712054], and
   [0147] nucleotide 114220 of SEQ ID NO:225 [marker 886895]; or
[0148] g) nucleotides of the TYRP1-C haplotype corresponding to:
   [0149] nucleotide 16220 of SEQ ID NO:227, [217486], and
   [0150] nucleotide 5463 of SEQ ID NO:227; [886937], or any combination thereof.

[0151] The haplotypes listed in elements a)-g) above are preferred penetrant pigmentation-related haplotypes for hair pigmentation, as illustrated in Example 18.

[0152] To improve the inference power, the method of this aspect of the invention directed at an inference drawn to hair color or hair shade, can be performed using a biological sample from a human subject by identifying a penetrant pigmentation-related haplotype allele in all of the following pigmentation-related haplotypes:
[0153] a) nucleotides of the ASIP-B haplotype corresponding to:
   [0154] nucleotide 1381 of SEQ ID NO:227, [559], and
   [0155] nucleotide 880 of SEQ ID NO:229, [560]
[0156] b) nucleotides of the MC1R-A haplotype corresponding to:
   [0157] nucleotide 915 of SEQ ID NO:228, [217438],
   [0158] nucleotide 1092 of SEQ ID NO:228 [217439], and
   [0159] nucleotide 1119 of SEQ ID NO:228 [217441];
[0160] c) nucleotides of the OCA2-G haplotype corresponding to:
   [0161] nucleotide 210654 of SEQ ID NO:225 [712060],
   [0162] nucleotide 147516 of SEQ ID NO:225, [886892], and
   [0163] nucleotide 114307 of SEQ ID NO:225 [marker 886896];
[0164] d) nucleotides of the OCA2-H haplotype corresponding to:
   [0165] nucleotide 108632 of SEQ ID NO:225, [217455],
   [0166] nucleotide 75403 of SEQ ID NO:225 [712057], and
   [0167] nucleotide 141832 of SEQ ID NO:225 [886894];
[0168] e) nucleotides of the OCA2-1 haplotype corresponding to:
   [0169] nucleotide 132483 of SEQ ID NO:225 [217458], and
   [0170] nucleotide 67333 of SEQ ID NO:225, [712056];
[0171] f) nucleotides of the OCA2-J haplotype corresponding to:
   [0172] nucleotide 193050 of SEQ ID NO:225, [712054], and
   [0173] nucleotide 114220 of SEQ ID NO:225 [marker 886895];
[0174] g) nucleotides of the TYRP1-C haplotype corresponding to:
   [0175] nucleotide 16220 of SEQ ID NO:227, [217486], and
   [0176] nucleotide 5463 of SEQ ID NO:227; [886937.

[0177] A method for inferring hair color or shade, wherein the pigmentation-related haplotype alleles are determined for any one combination of the pigmentation-related haplotypes for the haplotypes listed as elements a)-g) above, can further include identifying at least one of the following alleles:
[0178] a) the ASIP-B haplotype allele GA or AA;
[0179] b) the MC1R-A haplotype allele CCC;
[0180] c) the OCA2-G haplotype allele AGG, or AGA;
[0181] d) the OCA2-H haplotype allele AGT or ATT;
[0182] e) the OCA2-I haplotype allele TG;
[0183] f) the OCA2-J haplotype allele GA or AA; and
[0184] g) the TYRP1-C haplotype allele AA or TA.

[0185] By way of an example with improved inference power, the method of the invention for inferring hair color or shade wherein the pigmentation-related haplotype alleles are determined for all of the alleles listed above.

[0186] The method of the invention for this aspect of the invention includes methods wherein the pigmentation-related haplotype alleles are those listed in elements a)-h) above, and wherein the method further includes identifying in the nucleic acid sample, at least one latent pigmentation-related SNP of a pigmentation gene, to improve the power of the inference of hair color or hair shade.

[0187] The mammalian subject can also be a livestock species, such as a cow, a sheep, a pig, or a goat, etc., or a cat, a horse, or a dog, or other domestic animal, or a mouse, a rat, or a rabbit, or other laboratory species. The methods of the invention when practiced on a non-human subject, utilize pigmentation genes of the species of the non-human subject. These pigmentation genes include homologs of the human pigmentation genes disclosed herein. For example, in mice such homologs are known to exist, and some studies directed at mutations of pigmentation genes have been performed. Although little is known regarding SNPs of pigmentation genes of non-human species, MC1R SNPs have been described to be associated with chestnut coat coloration in horses (Rieder et al., Mamm Genome. 12(6):450-5 (2001).

[0188] In mammalian species, especially non-human subjects, the methods of the invention are valuable in providing predictions of commercially valuable pigmentation phenotypes, for example in breeding. For example, by using the methods of the invention, the methods of the invention can be used to derive homologous methods in other species that can be used to breed a mammalian subject such that offspring will be more likely to have a desired pigmentation trait. Furthermore, early stage embryos can be isolated and analyzed using the methods of the invention to select before implantation, those that will develop into adults with a desired pigmentation trait, whether it be coat color, eye color, or any other trait linked to pigmentation.

[0189] The term “genetic pigmentation trait” is used herein to mean a trait involving variation in the degree to which melanin is deposited in a particular tissue. Such deposition generally occurs during development of a mammalian organism, and is a function of the degree to which melanin is synthesized and degraded. As exemplified herein, the pigmentation trait can be the degree of hair pigmentation, which can be analyzed in terms of hair color or hair shade; or the degree of eye pigmentation, which can be analyzed in terms of eye color or eye shade; or the degree of skin pigmentation. Melanin is synthesized, degraded, deposited, and transported by a group of genes referred to herein as pigmentation genes. Pigmentation genes are usually defined as such based on loss of function mutations observed in man as well as model organisms such as mouse or Drosophila.

[0190] For hair shade, individuals generally are partitioned into two groups—persons of dark natural hair color (black or brown) and persons of light natural hair color (red, blonde). The term “eye color” is synonymous with the degree to which the iris is pigmented; the term “hair color” is synonymous with the degree to which the hair is pigmented. For eye shade, typically individuals are partitioned into two groups; persons of dark natural eye color (i.e., individuals of brown or black irises) and individuals of light iris shade group (i.e., individuals of blue, green, or hazel irises). Therefore, by way of example, the methods of the invention can determine whether the eye color of a subject is blue, green, hazel, black, or brown.

[0191] The first pigmentation gene and, where appropriate, second or other pigmentation genes useful for examination according to a method of the invention can be any gene that is involved in the production, degradation, or transport of melanin. In certain preferred embodiments, the first pigmentation gene examined according to a method of the invention is not MC1R or is not MC1R and ASIP, although in these embodiments the MC1R or ASIP gene can be the second, third, fourth or other pigmentation gene examined, thus strengthening an inference that can be drawn. Pigmentation genes can be identified by performing wet lab experiments, or as illustrated in the Examples, by identifying published reports of studies describing genes for which mutations are known to cause detectable changes in pigmentation. In humans, genes for which mutations cause severe hypopigmentation are especially attractive candidates as pigmentation genes for use in the disclosed methods.

[0192] Pigmentation genes can be identified based on evidence from the literature, and from other sources of information, that implicate them in either the synthesis, degradation and/or the deposition of the human chromatophore melanin. The Physicians Desk Reference, Online Mendelian Inheritance database (available at the National Center for Biotechnology Information web site) and PubMed/Medline are two examples of sources that provide such information.

[0193] Examples of pigmentation genes include OCA2, ASIP, OCA2, SILV, TYRP1, DCT, TYR, MC1R, and AP3B1. As disclosed herein, these pigmentation genes comprise loci of penetrant and/or latent SNP haplotypes for hair pigmentation (i.e., color and shade) and/or eye pigmentation (i.e., color and shade). The methods of the invention include the identification of pigmentation-related haplotype alleles for one pigmentation gene, as well as for any combination of two or more pigmentation genes, which can improve the power of the inference drawn. In certain aspects of the invention, the inferred pigmentation trait is eye shade and the pigmentation-related haplotype allele occurs in at least one of OCA2, TYRP1, or DCT. These genes are disclosed herein as including the loci of penetrant haplotypes associated with eye color and/or shade (see Example 17).

[0194] Mutations in the TYR, MC1R, TYRP1, and OCA genes have been shown to be deterministic for hereditary oculocutaneous albinism (reviewed in Oetting and King, Hum. Mutat. 13:99-115, 1999). Catastrophic mutations in any of these genes impair the synthesis and deposition of melanin in human epidermis. However, before the present study, relatively little was known about how these genes naturally vary in the non-albino population. For example, the human genome project has resulted in the generation of a publicly available human polymorphism database, which contains the location and identity of potential variants (SNPs) for many of the human genes. However, whether these potential variants are actual SNPs and whether they are associated with traits such as pigmentation-traits have not been reported.

[0195] Biochemical information is available regarding the function of pigmentation genes in the synthesis, degradation, and transport of melanin, including eumalanin (brown pigment) and pheomelanin (brown pigment). Eumelanin is a light absorbing polymer synthesized in specialized lysozomes called melanosomes in a specialized cell type called melanocytes. Within the melanosomes, the tyrosinase (TYR) gene product catalyzes the rate-limiting hydroxylation of tyrosine (to 3,4-dihydroxyphenylanine or DOPA) and oxidation of the resulting product (to DOPA quinone) to form the precursor for eumelanin synthesis. Though centrally important, pigmentation in animals is not simply a Mendelian function of TYR (or any other) gene sequences. In fact, study of the transmission genetics for pigmentation traits in man and various model systems suggests that variable pigmentation is a function of multiple, heritable factors whose interactions appear to be quite complex (Akey et al., Hum. Genet. 108:516-520, 2001; Brauer and Chopra, Anthropol. Anz. 36(2):109-120, 1978; Bito et al., Arch Ophthalmol. 115(5):659-663, 1997; Sturm et al., Gene 277:49-62, 2001; Box et al., Hum. Mole. Genet. 6:1891-1897, 1997; Box et al., Am. J. Hum. Genet. 69:765-773, 2001). For example, unlike human hair color (Sturm et al., Gene 277:49-62, 2001), there appears to be no dominance component for mammalian iris color determination (Brauer and Chopra, Anthropol. Anz. 36(2):109-120, 1978), and no correlation between skin, hair and iris color within or between individuals of a given population. In contrast, between-population comparisons show good concordance; populations with darker average iris color also tend to exhibit darker average skin tones and hair colors. These observations suggest that the genetic determinants for pigmentation in the various tissues are distinct, and that these determinants have been subject to a common set of systematic forces that have shaped their distribution in the worlds various populations.

[0196] At the cellular level, variable iris color in healthy humans is the result of the differential deposition of melanin pigment granules within a fixed number of stromal melanocytes in the iris (Imesch et al., Surv. Ophthalmol. 41 Suppl 2:S117-S123, 1997). The density of granules appears to reach genetically determined levels by early childhood and usually remains constant throughout later life (but, see Bito et al., Arch Ophthalmol. 115(5):659-663, 1997). Pedigree studies in the mid-seventies suggested iris color variation is a function of two loci; a single locus responsible for de-pigmentation of the iris, not affecting skin or hair, and another pleiotropic gene for reduction of pigment in all tissues (Brues, Am. J. Phys. Anthropol. 43(3):387-391, 1975). Most of what we have learned about pigmentation since has been derived from molecular genetics studies of rare pigmentation defects in man and model systems such as mouse and Drosophila. For example, dissection of the oculocutaneous albinism (OCA) trait in humans has shown that most pigmentation defects are due to lesions in one gene (TYR) resulting in their designation as tyrosinase (TYR) negative OCAs (Oetting and King, Hum. Mutat. 13:99-115, 1999; Oetting and King, Hum. Mutat. 2:1-6, 1993; Oetting and King, Hum. Genet. 90:258-262, 1992; Oetting and King, Clin. Res. 39:267A, 1991. TYR catalyzes the rate-limiting step of melanin biosynthesis and the degree to which human irises are pigmented correlates well with the amplitude of TYR message levels (Lindsey et al., Arch. Opthalmol. 119(6):853-860, 2001). Nonetheless, the complexity of OCA phenotypes has illustrated that TYR is not the only gene involved in iris pigmentation (Lee et al., Hum. Molec. Genet. 3:2047-2051, 1994). Though most TYR-negative OCA patients are completely de-pigmented, dark-iris albino mice (C44H), and their human type IB oculocutaneous counterparts exhibit a lack of pigment in all tissues except for the iris (Schmidt and Beermann, Proc. Natl. Acad. Sci., U.S.A. 91(11):4756-4760, 1994).

[0197] Study of a number of other TYR-positive OCA phenotypes have shown that, in addition to TYR, the oculocutaneous 2 (OCA2; Durham-Pierre et al., Nature Genet. 7:176-179, 1994; Durham-Pierre et al., Hum. Mutat. 7:370-373, 1996; Gardner et al., Science 257:1121-1124, 1992; Hamabe et al., Am. J. Med. Genet. 41:54-63, 1991), tyrosinase like protein (TYRP1; Chintamaneni et al., Biochem. Biophys. Res. Commun. 178:227-235, 1991; Abbott et al., Genomics 11:471-473, 1991; Boissy et al., Am. J. Hum. Genet. 58:1145-1156, 1996), melanocortin receptor (MCV1R; Robbins et al., Cell 72:827-834, 1993; Smith et al., J. Invest. Derm. 111:119-122, 1998; Flanagan et al., Hum. Molec. Genet. 9:2531-2537, 2000) and adaptin 3B (AP3B; Ooi et al., EMBO J. 16(15):4508-4518, 1997) loci, as well as other genes (reviewed by Sturm et al., Gene 277:49-62, 2001) are necessary for normal human iris pigmentation. In Drosophila, iris pigmentation defects have been ascribed to mutations in over 85 loci contributing to a variety of cellular processes in melanocytes (Ooi et al., EMBO J. 16(15):4508-4518, 1997; Lloyd et al., Trends Cell Biol. 8(7):257-259, 1998), but mouse studies have suggested that about 14 genes preferentially affect pigmentation in vertebrates (reviewed in Sturm et al., Gene 277:49-62, 2001), and that disparate regions of the TYR and other OCA genes are functionally inequivalent for determining the pigmentation in different tissues.

[0198] Though research on pigment mutants has made clear that a small subset of genes is largely responsible for catastrophic pigmentation defects in mice and man, until the present disclosure, it remained unclear whether or how common single nucleotide polymorphisms (SNPs) in these genes contribute towards (or are linked to) natural variation in human iris color. A brown-iris locus was localized to an interval containing the MC1R gene (Eiberg and Mohr, Eur. J. Hum. Genet. 4(4):237-241, 1996), and specific polymorphisms in the MC1R gene have been associated with red hair and blue iris color in relatively isolated Irish populations (Robbins et al., Cell 72:827-834, 1993; Smith et al., J. Invest. Derm. 111: 119-122, 1998; Flanagan et al., Hum. Molec. Genet. 9:2531-253 7, 2000; Valverde et al., Nature Genet. 11:328-330, 1995; Koppula et al., Hum. Mutat. 9:30-36, 1997). An ASIP polymorphism was also recently described that may be associated with both brown iris and hair color (Kanetsky et al., Am. J. Hum. Gen. 70:770-775, 2002) However, the penetrance of each of the MC1R and ASIP alleles is low and in general, they appear to explain only a very small amount of the overall variation in iris colors within the human population (Spritz, Nature Genet. 11:225-226, 1995). Such studies for associating genes and traits are gene-centric in that alleles descriptive of variant gene loci are considered as definitive and focal objects. To date, however, these methods have not worked well because most human traits are complex and genetic wholes are often times greater than the sum of its parts. As such, innovative genomics-based study designs and analytical methods for screening genetic data in silico, such as the methods disclosed herein, are needed that are respectful of genetic complexity (for example, the components of dominance and epistatic genetic variance).

[0199] Numerous methods for identifying haplotype alleles in nucleic acid samples (also referred to a surveying the genome) are disclosed herein or otherwise known in the art. As disclosed herein, nucleic acid occurrences for the individual SNPs that make up the haplotype alleles are determined, then, the nucleic acid occurrence data for the individual SNPs is combined to identify the haplotype alleles. For example, for the OCA2-A haplotype, both nucleotide occurrences at each SNP loci corresponding to markers 217458, 886894, and 886895 can be combined to determine a the two OCA2-A haplotype alleles of a subject (i.e., OCA2-A genotype; see Example 17). The Stephens and Donnelly algorithm (Am. J. Hum. Genet. 68:978-989, 2001, which is incorporated herein by reference) can be applied to the data generated regarding individual nucleotide occurrences in SNP markers of the subject, in order to determine the alleles for each haplotype in the subject's genotype. Other methods that can be used to determine alleles for each haplotype in the subject's genotype, for example Clarks algorithm, and an EM algorithm described by Raymond and Rousset (Raymond et al. 1994. GenePop. Ver 3.0. Institut des Siences de l'Evolution. Universite de Montpellier, France. 1994)

[0200] The attached sequence listing provides flanking nucleotide sequences for the SNPs disclosed herein. These flanking sequence serve to aid in the identification of the precise location of the SNPs in the human genome, and serve as target gene segments useful for performing methods of the invention. A target polynucleotide typically includes a SNP locus and a segment of a corresponding gene that flanks the SNP. Primers and probes that selectively hybridize at or near the target polynucleotide sequence, as well as specific binding pair members that can specifically bind at or near the target polynucleotide sequence, can be designed based on the disclosed gene sequences and information provided herein.

[0201] As used herein, the term “selective hybridization” or “selectively hybridize,” refers to hybridization under moderately stringent or highly stringent conditions such that a nucleotide sequence preferentially associates with a selected nucleotide sequence over unrelated nucleotide sequences to a large enough extent to be useful in identifying a nucleotide occurrence of a SNP. It will be recognized that some amount of non-specific hybridization is unavoidable, but is acceptable provide that hybridization to a target nucleotide sequence is sufficiently selective such that it can be distinguished over the non-specific cross-hybridization, for example, at least about 2-fold more selective, generally at least about 3-fold more selective, usually at least about 5-fold more selective, and particularly at least about 10-fold more selective, as determined, for example, by an amount of labeled oligonucleotide that binds to target nucleic acid molecule as compared to a nucleic acid molecule other than the target molecule, particularly a substantially similar (i.e., homologous) nucleic acid molecule other than the target nucleic acid molecule. Conditions that allow for selective hybridization can be determined empirically, or can be estimated based, for example, on the relative GC:AT content of the hybridizing oligonucleotide and the sequence to which it is to hybridize, the length of the hybridizing oligonucleotide, and the number, if any, of mismatches between the oligonucleotide and sequence to which it is to hybridize (see, for example, Sambrook et al., “Molecular Cloning: A laboratory manual (Cold Spring Harbor Laboratory Press 1989)).

[0202] An example of progressively higher stringency conditions is as follows: 2×SSC/0.1% SDS at about room temperature (hybridization conditions); 0.2×SSC/0.1% SDS at about room temperature (low stringency conditions); 0.2×SSC/0.1% SDS at about 42EC (moderate stringency conditions); and 0.1×SSC at about 68EC (high stringency conditions). Washing can be carried out using only one of these conditions, e.g., high stringency conditions, or each of the conditions can be used, e.g., for 10-15 minutes each, in the order listed above, repeating any or all of the steps listed. However, as mentioned above, optimal conditions will vary, depending on the particular hybridization reaction involved, and can be determined empirically.

[0203] The term “polynucleotide” is used broadly herein to mean a sequence of deoxyribonucleotides or ribonucleotides that are linked together by a phosphodiester bond. For convenience, the term “oligonucleotide” is used herein to refer to a polynucleotide that is used as a primer or a probe. Generally, an oligonucleotide useful as a probe or primer that selectively hybridizes to a selected nucleotide sequence is at least about 15 nucleotides in length, usually at least about 18 nucleotides, and particularly about 21 nucleotides or more in length.

[0204] A polynucleotide can be RNA or can be DNA, which can be a gene or a portion thereof, a cDNA, a synthetic polydeoxyribonucleic acid sequence, or the like, and can be single stranded or double stranded, as well as a DNA/RNA hybrid. In various embodiments, a polynucleotide, including an oligonucleotide (e.g., a probe or a primer) can contain nucleoside or nucleotide analogs, or a backbone bond other than a phosphodiester bond. In general, the nucleotides comprising a polynucleotide are naturally occurring deoxyribonucleotides, such as adenine, cytosine, guanine or thymine linked to 2′-deoxyribose, or ribonucleotides such as adenine, cytosine, guanine or uracil linked to ribose. However, a polynucleotide or oligonucleotide also can contain nucleotide analogs, including non-naturally occurring synthetic nucleotides or modified naturally occurring nucleotides. Such nucleotide analogs are well known in the art and commercially available, as are polynucleotides containing such nucleotide analogs (Lin et al., Nucl. Acids Res. 22:5220-5234 (1994); Jellinek et al., Biochemistry 34:11363-11372 (1995); Pagratis et al., Nature Biotechnol. 15:68-73 (1997), each of which is incorporated herein by reference).

[0205] The covalent bond linking the nucleotides of a polynucleotide generally is a phosphodiester bond. However, the covalent bond also can be any of numerous other bonds, including a thiodiester bond, a phosphorothioate bond, a peptide-like bond or any other bond known to those in the art as useful for linking nucleotides to produce synthetic polynucleotides (see, for example, Tam et al., Nucl. Acids Res. 22:977-986 (1994); Ecker and Crooke, BioTechnology 13:351360 (1995), each of which is incorporated herein by reference). The incorporation of non-naturally occurring nucleotide analogs or bonds linking the nucleotides or analogs can be particularly useful where the polynucleotide is to be exposed to an environment that can contain a nucleolytic activity, including, for example, a tissue culture medium or upon administration to a living subject, since the modified polynucleotides can be less susceptible to degradation.

[0206] A polynucleotide or oligonucleotide comprising naturally occurring nucleotides and phosphodiester bonds can be chemically synthesized or can be produced using recombinant DNA methods, using an appropriate polynucleotide as a template. In comparison, a polynucleotide or oligonucleotide comprising nucleotide analogs or covalent bonds other than phosphodiester bonds generally are chemically synthesized, although an enzyme such as T7 polymerase can incorporate certain types of nucleotide analogs into a polynucleotide and, therefore, can be used to produce such a polynucleotide recombinantly from an appropriate template (Jellinek et al., supra, 1995). Thus, the term polynucleotide as used herein includes naturally occurring nucleic acid molecules, which can be isolated from a cell, as well as synthetic molecules, which can be prepared, for example, by methods of chemical synthesis or by enzymatic methods such as by the polymerase chain reaction (PCR).

[0207] In various embodiments, it can be useful to detectably label a polynucleotide or oligonucleotide. Detectable labeling of a polynucleotide or oligonucleotide is well known in the art. Particular non-limiting examples of detectable labels include chemiluminescent labels, radiolabels, enzymes, haptens, or even unique oligonucleotide sequences.

[0208] A method of the identifying a SNP also can be performed using a specific binding pair member. As used herein, the term “specific binding pair member” refers to a molecule that specifically binds or selectively hybridizes to another member of a specific binding pair. Specific binding pair member include, for example, probes, primers, polynucleotides, antibodies, etc. For example, a specific binding pair member includes a primer or a probe that selectively hybridizes to a target polynucleotide that includes a SNP loci, or that hybridizes to an amplification product generated using the target polynucleotide as a template.

[0209] For example, a specific binding pair member of the invention can be an oligonucleotide or an antibody that, under the appropriate conditions, selectively binds to a target polynucleotide at or near nucleotide 16220 of SEQ ID NO:227 [marker 217486], nucleotide 224 of SEQ ID NO:227 [marker 869745], nucleotide 1084 of SEQ ID NO:227 [marker 869787], nucleotide 147516 of SEQ ID NO:225 [marker 886892], nucleotide 114220 of SEQ ID NO:225 [marker 886895], nucleotide 114307 of SEQ ID NO:225 [marker 886896], nucleotide 4998 of SEQ ID NO:227 [marker 886933], nucleotide 5463 of SEQ ID NO:227 [marker 886937], nucleotide 113047 of SEQ ID NO:225 [marker 886994], nucleotide 141832 of SEQ ID NO:225 [marker 886894], nucleotide 11359 of SEQ ID NO:227 [marker 886938], nucleotide 14903 of SEQ ID NO:227 [marker 886943], or nucleotide 14820 of SEQ ID NO:227 [marker 886942]. As such, a specific binding pair member of the invention can be an oligonucleotide probe, which can selectively hybridize to a target polynucleotide and can, but need not, be a substrate for a primer extension reaction, or an anti-nucleic acid antibody. The specific binding pair member can be selected such that it selectively binds to any portion of a target polynucleotide, as desired, for example, to a portion of a target polynucleotide containing a SNP as the terminal nucleotide.

[0210] As used herein, the term “specific interaction,” or “specifically binds” or the like means that two molecules form a complex that is relatively stable under physiologic conditions. The term is used herein in reference to various interactions, including, for example, the interaction of an antibody that binds a polynucleotide that includes a SNP site; or the interaction of an antibody that binds a polypeptide that includes an amino acid that is encoded by a codon that includes a SNP site. According to methods of the invention, an antibody can selectively bind to a polypeptide that includes a particular amino acid encoded by a codon that includes a SNP site. Alternatively, an antibody may preferentially bind a particular modified nucleotide that is incorporated into a SNP site for only certain nucleotide occurrences at the SNP site, for example using a primer extension assay.

[0211] A specific interaction can be characterized by a dissociation constant of at least about 1×10⁻⁶ M, generally at least about 1×10⁻⁷ M, usually at least about 1×10⁻⁸ M, and particularly at least about 1×10⁻⁹ M or 1×10⁻¹⁰ M or greater. A specific interaction generally is stable under physiological conditions, including, for example, conditions that occur in a living individual such as a human or other vertebrate or invertebrate, as well as conditions that occur in a cell culture such as used for maintaining mammalian cells or cells from another vertebrate organism or an invertebrate organism. Methods for determining whether two molecules interact specifically are well known and include, for example, equilibrium dialysis, surface plasmon resonance, and the like.

[0212] Numerous methods are known in the art for determining the nucleotide occurrence for a particular SNP in a sample. Such methods can utilize one or more oligonucleotide probes or primers, including, for example, an amplification primer pair, that selectively hybridize to a target polynucleotide, which contains one or more pigmentation-related SNP positions. Oligonucleotide probes useful in practicing a method of the invention can include, for example, an oligonucleotide that is complementary to and spans a portion of the target polynucleotide, including the position of the SNP, wherein the presence of a specific nucleotide at the position (i.e., the SNP) is detected by the presence or absence of selective hybridization of the probe. Such a method can further include contacting the target polynucleotide and hybridized oligonucleotide with an endonuclease, and detecting the presence or absence of a cleavage product of the probe, depending on whether the nucleotide occurrence at the SNP site is complementary to the corresponding nucleotide of the probe.

[0213] An oligonucleotide ligation assay also can be used to identify a nucleotide occurrence at a polymorphic position, wherein a pair of probes that selectively hybridize upstream and adjacent to and downstream and adjacent to the site of the SNP, and wherein one of the probes includes a terminal nucleotide complementary to a nucleotide occurrence of the SNP. Where the terminal nucleotide of the probe is complementary to the nucleotide occurrence, selective hybridization includes the terminal nucleotide such that, in the presence of a ligase, the upstream and downstream oligonucleotides are ligated. As such, the presence or absence of a ligation product is indicative of the nucleotide occurrence at the SNP site.

[0214] An oligonucleotide also can be useful as a primer, for example, for a primer extension reaction, wherein the product (or absence of a product) of the extension reaction is indicative of the nucleotide occurrence. In addition, a primer pair useful for amplifying a portion of the target polynucleotide including the SNP site can be useful, wherein the amplification product is examined to determine the nucleotide occurrence at the SNP site. Particularly useful methods include those that are readily adaptable to a high throughput format, to a multiplex format, or to both. The primer extension or amplification product can be detected directly or indirectly and/or can be sequenced using various methods known in the art. Amplification products which span a SNP loci can be sequenced using traditional sequence methodologies (e.g., the “dideoxy-mediated chain termination method,” also known as the “Sanger Method” (Sanger, F., et al., J. Molec. Biol. 94:441 (1975); Prober et al. Science 238:336-340 (1987)) and the “chemical degradation method,” “also known as the “Maxam-Gilbert method” (Maxam, A. M., et al., Proc. Natl. Acad. Sci. (U.S.A.) 74:560 (1977)), both references herein incorporated by reference) to determine the nucleotide occurrence at the SNP loci.

[0215] Methods of the invention can identify nucleotide occurrences at SNPs using a “microsequencing” method. Microsequencing methods determine the identity of only a single nucleotide at a “predetermined” site. Such methods have particular utility in determining the presence and identity of polymorphisms in a target polynucleotide. Such microsequencing methods, as well as other methods for determining the nucleotide occurrence at a SNP loci are discussed in Boyce-Jacino, et al., U.S. Pat. No. 6,294,336, incorporated herein by reference, and summarized herein.

[0216] Microsequencing methods include the Genetic Bit Analysis method disclosed by Goelet, P. et al. (WO 92/15712, herein incorporated by reference). Additional, primer-guided, nucleotide incorporation procedures for assaying polymorphic sites in DNA have also been described (Komher, J. S. et al, Nucl. Acids. Res. 17:7779-7784 (1989); Sokolov, B. P., Nucl. Acids Res. 18:3671 (1990); Syvanen, A.-C., et al., Genomics 8:684-692 (1990); Kuppuswamy, M. N. et al., Proc. Natl. Acad. Sci. (U.S.A.) 88:1143-1147 (1991); Prezant, T. R. et al, Hum. Mutat. 1: 159-164 (1992); Ugozzoli, L. et al., GATA 9:107-112 (1992); Nyren, P. et al., Anal. Biochem. 208:171-175 (1993); and Wallace, WO89/10414). These methods differ from Genetic Bit™. Analysis in that they all rely on the incorporation of labeled deoxynucleotides to discriminate between bases at a polymorphic site. In such a format, since the signal is proportional to the number of deoxynucleotides incorporated, polymorphisms that occur in runs of the same nucleotide can result in signals that are proportional to the length of the run (Syvanen, A.-C., et al. Amer. J. Hum. Genet. 52:46-59 (1993)).

[0217] Alternative microsequencing methods have been provided by Mundy, C. R. (U.S. Pat. No. 4,656,127) and Cohen, D. et al (French Patent 2,650,840; PCT Appln. No. WO91/02087) which discusses a solution-based method for determining the identity of the nucleotide of a polymorphic site. As in the Mundy method of U.S. Pat. No. 4,656,127, a primer is employed that is complementary to allelic sequences immediately 3′- to a polymorphic site.

[0218] In response to the difficulties encountered in employing gel electrophoresis to analyze sequences, alternative methods for microsequencing have been developed. Macevicz (U.S. Pat. No. 5,002,867), for example, describes a method for determining nucleic acid sequence via hybridization with multiple mixtures of oligonucleotide probes. In accordance with such method, the sequence of a target polynucleotide is determined by permitting the target to sequentially hybridize with sets of probes having an invariant nucleotide at one position, and a variant nucleotides at other positions. The Macevicz method determines the nucleotide sequence of the target by hybridizing the target with a set of probes, and then determining the number of sites that at least one member of the set is capable of hybridizing to the target (i.e., the number of “matches” ). This procedure is repeated until each member of a sets of probes has been tested.

[0219] Boyce-Jacino, et al., U.S. Pat. No. 6,294,336 provides a solid phase sequencing method for determining the sequence of nucleic acid molecules (either DNA or RNA) by utilizing a primer that selectively binds a polynucleotide target at a site wherein the SNP is the most 3′ nucleotide selectively bound to the target.

[0220] In one particular commercial example of a method that can be used to identify a nucleotide occurrence of one or more SNPs, the nucleotide occurrences of pigmentation-related SNPs in a sample can be determined using the SNP-IT™ method (Orchid BioSciences, Inc., Princeton, N.J.). In general, SNP-IT™ is a 3-step primer extension reaction. In the first step a target polynucleotide is isolated from a sample by hybridization to a capture primer, which provides a first level of specificity. In a second step the capture primer is extended from a terminating nucleotide trisphosphate at the target SNP site, which provides a second level of specificity. In a third step, the extended nucleotide trisphosphate can be detected using a variety of known formats, including: direct fluorescence, indirect fluorescence, an indirect colorimetric assay, mass spectrometry, fluorescence polarization, etc. Reactions can be processed in 384 well format in an automated format using a SNPstream™ instrument ((Orchid BioSciences, Inc., Princeton, N.J.).

[0221] In a specific example of a method for identifying marker 217458 of the OCA2-A haplotype, a primer pair is synthesized that comprises a forward primer that hybridizes to a sequence 5′ to the SNP of SEQ ID NO:7 (the SEQ ID corresponding to marker 217458 (see Table 1) and which is also present at nucleotide positions 132349-132783 of SEQ ID NO:225) and a reverse primer that hybridizes to the opposite strand of a sequence 3 to the SNP of SEQ ID NO:7. This primer pair is used to amplify a target polynucleotide that includes marker 217458, to generate an amplification product. A third primer can then be used as a substrate for a primer extension reaction. The third primer can bind to the amplification product such that the 3′ nucleotide of the third primer (e.g., adenosine) binds to the marker 217458 site and is used for a primer extension reaction. The primer can be designed and conditions determined such that the primer extension reaction proceeds only if the 3′ nucleotide of the third primer is complementary to the nucleotide occurrence at the SNP which proceeds if the nucleotide occurrence of marker 217458 is a thymidine, for example, but not if the nucleotide occurrence of the marker is cytidine.

[0222] Phase known data can be generated by inputting phase unknown raw data from the SNPstream™ instrument into the Stephens and Donnelly's PHASE program.

[0223] Accordingly, using the methods described above, the pigmentation-related haplotype allele or the nucleotide occurrence of the pigmentation-related SNP can be identified using an amplification reaction, a primer extension reaction, or an immunoassay. The pigmentation-related haplotype allele or the pigmentation-related SNP can also be identified by contacting polynucleotides in the sample or polynucleotides derived from the sample, with a specific binding pair member that selectively hybridizes to a polynucleotide region comprising the pigmentation-related SNP, under conditions wherein the binding pair member specifically binds at or near the pigmentation-related SNP. The specific binding pair member can be an antibody or a polynucleotide.

[0224] Antibodies that are used in the methods of the invention include antibodies that specifically bind polynucleotides that encompass a pigmentation-related or race-related haplotype. In addition, antibodies of the invention bind polypeptides that include an amino acid encoded by a codon that includes a SNP. These antibodies bind to a polypeptide that includes an amino acid that is encoded in part by the SNP. The antibodies specifically bind a polypeptide that includes a first amino acid encoded by a codon that includes the SNP loci, but do not bind, or bind more weakly to a polypeptide that includes a second amino acid encoded by a codon that includes a different nucleotide occurrence at the SNP.

[0225] Antibodies are well-known in the art and discussed, for example, in U.S. Pat. No. 6,391,589. Antibodies of the invention include, but are not limited to, polyclonal, monoclonal, multispecific, human, humanized or chimeric antibodies, single chain antibodies, Fab fragments, F(ab′) fragments, fragments produced by a Fab expression library, anti-idiotypic (anti-Id) antibodies (including, e.g., anti-Id antibodies to antibodies of the invention), and epitope-binding fragments of any of the above. The term “antibody,” as used herein, refers to immunoglobulin molecules and immunologically active portions of immunoglobulin molecules, i.e., molecules that contain an antigen binding site that immunospecifically binds an antigen. The immunoglobulin molecules of the invention can be of any type (e.g., IgG, IgE, IgM, IgD, IgA and IgY), class (e.g., IgG1, IgG2, IgG3, IgG4, IgA1 and IgA2) or subclass of immunoglobulin molecule.

[0226] Antibodies of the invention include antibody fragments that include, but are not limited to, Fab, Fab′ and F(ab′)2, Fd, single-chain Fvs (scFv), single-chain antibodies, disulfide-linked Fvs (sdFv) and fragments comprising either a VL or VH domain. Antigen-binding antibody fragments, including single-chain antibodies, may comprise the variable region(s) alone or in combination with the entirety or a portion of the following: hinge region, CH1, CH2, and CH3 domains. Also included in the invention are antigen-binding fragments also comprising any combination of variable region(s) with a hinge region, CH1, CH2, and CH3 domains. The antibodies of the invention may be from any animal origin including birds and mammals. Preferably, the antibodies are human, murine (e.g., mouse and rat), donkey, ship rabbit, goat, guinea pig, camel, horse, or chicken. The antibodies of the invention may be monospecific, bispecific, trispecific or of greater multispecificity.

[0227] The antibodies of the invention may be generated by any suitable method known in the art. Polyclonal antibodies to an antigen-of-interest can be produced by various procedures well known in the art. For example, a polypeptide of the invention can be administered to various host animals including, but not limited to, rabbits, mice, rats, etc. to induce the production of sera containing polyclonal antibodies specific for the antigen. Various adjuvants may be used to increase the immunological response, depending on the host species, and include but are not limited to, Freund's (complete and incomplete), mineral gels such as aluminum hydroxide, surface active substances such as lysolecithin, pluronic polyols, polyanions, peptides, oil emulsions, keyhole limpet hemocyanins, dinitrophenol, and potentially useful human adjuvants such as BCG (bacille Calmette-Guerin) and Corynebacterium parvum. Such adjuvants are also well known in the art.

[0228] Monoclonal antibodies can be prepared using a wide variety of techniques known in the art including the use of hybridoma, recombinant, and phage display technologies, or a combination thereof. For example, monoclonal antibodies can be produced using hybridoma techniques including those known in the art and taught, for example; in Harlow et al., Antibodies: A Laboratory Manual, (Cold Spring Harbor Laboratory Press, 2nd ed. 1988); Hammerling, et al., in: Monoclonal Antibodies and T-Cell Hybridomas 563-681 (Elsevier, N.Y., 1981) (said references incorporated by reference in their entireties). The term “monoclonal antibody” as used herein is not limited to antibodies produced through hybridoma technology. The term “monoclonal antibody” refers to an antibody that is derived from a single clone, including any eukaryotic, prokaryotic, or phage clone, and not the method by which it is produced.

[0229] Where the particular nucleotide occurrence of a SNP, or nucleotide occurrences of a pigmentation-related haplotype, is such that the nucleotide occurrence results in an amino acid change in an encoded polypeptide, the nucleotide occurrence can be identified indirectly by detecting the particular amino acid in the polypeptide. The method for determining the amino acid will depend, for example, on the structure of the polypeptide or on the position of the amino acid in the polypeptide.

[0230] Where the polypeptide contains only a single occurrence of an amino acid encoded by the particular SNP, the polypeptide can be examined for the presence or absence of the amino acid. For example, where the amino acid is at or near the amino terminus or the carboxy terminus of the polypeptide, simple sequencing of the terminal amino acids can be performed. Alternatively, the polypeptide can be treated with one or more enzymes and a peptide fragment containing the amino acid position of interest can be examined, for example, by sequencing the peptide, or by detecting a particular migration of the peptide following electrophoresis. Where the particular amino acid comprises an epitope of the polypeptide, the specific binding, or absence thereof, of an antibody specific for the epitope can be detected. Other methods for detecting a particular amino acid in a polypeptide or peptide fragment thereof are well known and can be selected based, for example, on convenience or availability of equipment such as a mass spectrometer, capillary electrophoresis system, magnetic resonance imaging equipment, and the like.

[0231] In another aspect, the invention is a method for inferring a genetic pigmentation trait of a mammalian subject from a nucleic acid sample of the mammalian subject, wherein the method includes identifying a nucleotide occurrence in the sample for at least one pigmentation-related single nucleotide polymorphism (SNP) from a pigmentation gene. The pigmentation gene can be oculocutaneous albinism II (OCA2), agouti signaling protein (ASIP), tyrosinase-related protein 1 (TYRP1), tyrosinase (TYR), adaptor-related protein complex 3, beta 1 subunit (AP3B1), AP3D1, dopachrome tautomerase (DCT), silver homolog (SILV), AIM-1 protein (LOC51151), proopiomelanocortin (POMC), ocular albinism 1 (OA1), microphthalmia-associated transcription factor (MITF), myosin VA (MYO5A), RAB27A, or coagulation factor II (thrombin) receptor-like 1 (F2RL1). The nucleotide occurrence is associated with the pigmentation trait of the mammalian subject, thereby inferring the pigmentation trait of the mammalian subject. The method can further include identifying in the nucleic acid sample at least one nucleotide occurrence for at least a second pigmentation-related SNP of at least a second pigmentation gene. In certain preferred embodiments where the method involves only a single pigmentation-related SNP or involves pigmentation-related SNPs in a single gene, the pigmentation-related SNP(s) are not the ASIP SNPs disclosed in Kenetsky et al., Am. J. Hun. Genet., 70:770 (2002).

[0232] The method can further comprise identifying in the nucleic acid sample a nucleotide occurrence for at least a second pigmentation-related SNP of at least a second pigmentation gene. The second pigmentation gene can be OCA2, ASIP, TYRP1, TYR, AP3B1, AP3D1, DCT, SILV, LOC51151, POMC, OA1, MITF, MYO5A, RAB27A, F2RL1, or melanocortin-1 receptor (MCV1R), or any combination of these genes.

[0233] In certain embodiments of methods according to this aspect of the invention, the first pigmentation gene does not include the MC1R gene.

[0234] A method according to this aspect of the invention infers eye color or eye shade as the pigmentation trait, and identifies the nucleotide occurrence for at least one of: nucleotide 27585 of SEQ ID NO:226 [marker 702], nucleotide 8298 of SEQ ID NO:226 [marker 650], nucleotide 32086 of SEQ ID NO:226 [marker 675], nucleotide 915 of SEQ ID NO:228 [marker 217438], nucleotide 1092 of SEQ ID NO:228 [marker 217439], nucleotide 1119 of SEQ ID NO:228 [marker 217441]; nucleotide 132483 of SEQ ID NO:225 [marker 217458], nucleotide 141832 of SEQ ID NO:225 [marker 886894], nucleotide 114220 of SEQ ID NO:225 [marker 886895], nucleotide 114307 of SEQ ID NO:225 [marker 886896], nucleotide 84355 of SEQ ID NO:225 [217452], nucleotide 418566 of SEQ ID NO:225 [712052], nucleotide 113047 of SEQ ID NO:225 [marker 886994], nucleotide 75403 of SEQ ID NO:225 [marker 712057], nucleotide 144364 of SEQ ID NO:225 [marker 712058], nucleotide 210654 of SEQ ID NO:225 [marker 712060], nucleotide 147364 of SEQ ID NO:225 [marker 712064], nucleotide 193050 of SEQ ID NO:225 [marker 712054], nucleotide 67333 of SEQ ID NO:225 [marker 712056], nucleotide 147516 of SEQ ID NO:225 [marker 886892], nucleotide 108632 of SEQ ID NO:225 [marker 217455], nucleotide 108680 of SEQ ID NO:225 [marker 712061], nucleotide 147516 of SEQ ID NO:225 [marker 886892], nucleotide 11359 of SEQ ID NO:227 [marker 886938], or nucleotide 14903 of SEQ ID NO:227 [marker 886943], or any combination thereof. These SNPs listed in this example are penetrant SNPs in that they make up penetrant haplotypes as illustrated in Example 17.

[0235] Furthermore, in methods of this aspect of the invention involving the penetrant SNPs listed above, a method of the invention identifies nucleotide occurrences for at least one of: nucleotide 880 of SEQ ID NO:229 [marker 560], nucleotide 429 of SEQ ID NO:227 [marker 552], nucleotide 1381 of SEQ ID NO:227 [marker 559], nucleotide 3037 of SEQ ID NO:227 [marker 468], nucleotide 2543 of SEQ ID NO:226 [marker 657], nucleotide 11764 of SEQ ID NO:226 [marker 674], nucleotide 29117 of SEQ ID NO:226 [marker 632], nucleotide 4269 of SEQ ID NO:226 [marker 701], nucleotide 274271 of SEQ ID NO:226 [marker 710]; nucleotide 114086 of SEQ ID NO:225 [marker 217456], nucleotide 11799 of SEQ ID NO:230 [marker 656], nucleotide 8481 of SEQ ID NO:230, nucleotide 8699 of SEQ ID NO:230 [marker 637], nucleotide 106523 of SEQ ID NO:231 [marker 278], nucleotide 107830 of SEQ ID NO:231 [marker 386], nucleotide 118064 of SEQ ID NO:231 [marker 217480], nucleotide 50575 of SEQ ID NO:231 [marker 951497], nucleotide 1080 of SEQ ID NO:231 [marker 217468], nucleotide 107348 of SEQ ID NO:231 [marker 217473], nucleotide 15939 of SEQ ID NO:227 [marker 217485], nucleotide 16220 of SEQ ID NO:227 [marker 217486], nucleotide 1084 of SEQ ID NO:227 [marker 869787], nucleotide 224 of SEQ ID NO:227 [marker 869745], nucleotide 4998 of SEQ ID NO:227 [marker 886933], nucleotide 5463 of SEQ ID NO:227 [marker 886937], or nucleotide 14820 of SEQ ID NO:227 [marker 886942], or any combination thereof. These SNPs are latent SNPs for eye pigmentation in that they make up the latent haplotypes identified in Example 17.

[0236] A method according to this aspect of the invention can infer hair color or hair shade as the pigmentation trait, and can identify the nucleotide occurrence for at least one of: nucleotide 1381 of SEQ ID NO:227 [marker 559], nucleotide 880 of SEQ ID NO:229 [marker 560], nucleotide 915 of SEQ ID NO:228 [marker 217438], nucleotide 1092 of SEQ ID NO:228 [marker 217439], nucleotide 1119 of SEQ ID NO:228 [marker 217441], nucleotide 210654 of SEQ ID NO:225 [marker 712060], nucleotide 147516 of SEQ ID NO:225 [marker 886892], nucleotide 114307 of SEQ ID NO:225 [marker 886896], nucleotide 108632 of SEQ ID NO:225 [marker 217455], nucleotide 75403 of SEQ ID NO:225 [marker 712057], nucleotide 141832 of SEQ ID NO:225 [marker 886894], nucleotide 132483 of SEQ ID NO:225 [marker 217458], nucleotide 67333 of SEQ ID NO:225 [marker 712056], nucleotide 193050 of SEQ ID NO:225 [marker 712054], nucleotide 114220 of SEQ ID NO:225 [marker 886895], nucleotide 16220 of SEQ ID NO:227, [217486], nucleotide 5463 of SEQ ID NO:227; [886937], or any combination thereof. These SNPs are penetrant SNPs for hair pigmentation in that they make up the penetrant haplotypes identified in Example 18.

[0237] The method of the invention that include identifying a nucleotide occurrence in the sample for at least one pigmentation-related SNP from a pigmentation gene, as discussed above, in preferred embodiments can include grouping the nucleotide occurrences of the pigmentation-related SNPs for a pigmentation gene into one or more identified haplotype alleles of a pigmentation-related haplotype. To infer the pigmentation trait of the subject, the identified haplotype alleles are then compared to known haplotype alleles of the pigmentation-related haplotype, wherein the relationship of the known haplotype alleles to the genetic pigmentation trait is known.

[0238] In another aspect, the present method provides a method for inferring a genetic pigmentation trait of a mammalian subject from a biological sample of the mammalian subject. The method includes identifying a nucleotide occurrence in the sample for a pigmentation-related single nucleotide polymorphism (SNP) from a pigmentation gene, wherein the pigmentation gene is other than melanocortin-1 receptor (MC1R). The nucleotide occurrence is associated with the pigmentation trait of the mammalian subject, thereby allowing an inference to be drawn related to pigmentation trait of the mammalian subject.

[0239] In another aspect, the invention provides a method for inferring race of a human subject from a biological sample of the human subject. The method includes identifying in the nucleic acid sample, the nucleotide occurrence of at least one race-related single nucleotide polymorphism (SNP) of a race-related gene. The nucleotide occurrence of the race-related SNP is associated with race, thereby allowing an inference to be drawn regarding the race of the subject.

[0240] Human identity testing relies on the fact that binned alleles from polymorphic loci segregate into unique combinations in individual human beings. The allele combinations serve as “bar-codes” by which to unambiguously identify individual human beings. Because systematic genetic forces have shaped the genetic structure of modern day humanity, most human polymorphisms, including STRs and SNPs, are characterized by alleles that are unevenly distributed among the various populations of the world. In the case of STR markers, inter-population differences in allele frequencies are so great that knowledge of the individuals racial background is required to formally qualify STR alleles for exclusion calculations (Budowle et al., J. Forensic Sci. 46(3):453-489, 2001; Levadokou et al., J. Forensic Sci. 46(3):736-761, 2001; Budowle et al., Clin. Chim. Acta 228(1):3-18, 1994; Kersting et al., Croat Med. J. 42(3):310-314, 2001; Meyer et al., Int. Int. J. Legal Med. 107(6):314-322, 1995).

[0241] Use of a database for the wrong population can result in errors of several orders of magnitude (Monson et al., J. Forensic Sci. 43(3):483-488, 1998). Though these exclusion calculations can be performed retrospectively, once the perpetrator has been identified, there is a great need for racial profiling tools that function in a retrospective (suspect already in hand) as well as a prospective (suspect not yet identified) capacity. Racial classifiers can assist retrospective case work because, for various reasons, including within-individual mixture, race is not always easily discernable in certain individuals. A good racial classification tool that genetically defines a person's racial and ethnic background (including mixture) can legally justify the choice of reference database(s) used for calculating exclusion probabilities. In a prospective sense, racial classification markers can be (and are) used to guide criminal investigations towards individuals that cannot be racially excluded. In some cases, a racial classification result can provide just cause for legally requesting a DNA specimen from a suspect, and in so doing, create a leverage crux for maximizing the efficacy of our criminal justice system.

[0242] Various probabilistic methods have been proposed to take advantage of inter-population frequency differences for inferring the racial origin of DNA specimens (Brenner, Am. J. Hum. Genet., 62(6):1558-1560, 1998; Lowe et al., Forensic Sci. Int. 119(1):17-22, 2001; Brenner, Proceedings 7^{th} Intl. Symposium on Hum. Identification 4892, 1997). For example, Bayesian statistical schemes have been employed to use allele frequencies in given populations (class conditional probabilities) for the calculation of the posterior probability that a DNA sample was derived from an individual of that population. Most STR markers currently in use (i.e., F13A, THO1, FES/FPS and VWA) offer little power to resolve between the possible racial groups that a specimen can belong. Resolution values for distinguishing individuals of African from Caucasian descent average about r=1.7 (log10r=0.4) per locus, which means that, assuming a prior probability of 50% classification in alternative, wrong decisions would be made 20% of the time. Though a collection of such markers may effectively resolve racial origin in most cases, the statistical distributions are such that 5-10% of classifications are ambiguous (Brenner, Proceedings 7^{th} Intl. Symposium on Hum. Identification 4892, 1997). Clearly, given the scrutiny afforded to forensic statistical calculations in the courtroom (particularly when speaking of court orders for requesting DNA specimens from suspects), greater performance is necessary. Either markers that show more dramatic racial bias (log10r values 2 or greater) need to be found, or a very large collection of modest markers need to be identified.

[0243] In fact, screens for STR markers of dramatic racial bias have been conducted, and resulted in the discovery of 10 loci capable of resolving Caucasian Americans from African Americans (Shriver et al, Am. J. Hum. Genet. 60:957-964, 1997). Though Bayesian racial inference methods using these STR markers appear to be fairly robust, there is considerable debate on their rigor. Some of this debate focuses on general problems of what race really is (Goodman, Am. J. Public Health 90(11):1699-1702, 2000), which apply to any test, but the most compelling arguments against the STR methods are technical and statistical in nature (Brenner, Proceedings 7^{th} Intl. Symposium on Hum. Identification 4892, 1997, Erickson and Svensmark, Int. J. Legal Med. 106:254-257, 1994, Evett et al., .J Forensic Sci. Soc. 32:301-306, 1992, Shriver et al, Am. J. Hum. Genet. 60:957-964, 1997). For example, population-specific allele frequency determination is often biased for STR markers due to inequalities and bias in reference database resources. STR markers have a relatively large number of alleles (often 20 or more), and this complexity can cause sampling bias in the estimation of allele frequencies in certain populations. Sampling bias can cause estimated frequencies to appear smaller or greater than they really are, artificially inflating or deflating (sometimes dramatically) the log likelihood ratios of racial classification (Brenner, Proceedings 7^{th} Intl. Symposium on Hum. Identification 4892, 1997). Problems such as these are unique to multi-allelic markers such as STRs.

[0244] A positive by-product of STR allelic complexity is that relatively few loci need be measured for each test to identify a human, or infer his or her ethnic origin. Indeed, because this reduces the number of assays that need to be executed for each sample, this is one reason they are used. A negative by-product of this complexity, however, is that very large databases are required in order to estimate allele frequencies, which are necessary for identity or racial exclusion calculations. For this reason, loci of complex allelic structure impose unique statistical problems for both identity testing and racial inference. In contrast, bi-allelic tests (i.e., SNPs) involve the measurement of larger numbers of loci of simpler allelic structure to obtain the same statistical power as STR markers, because there are only two alleles for each locus in the population. However, because of the small number of alleles, fewer individuals from each population are necessary for accurate minor allele frequency determinations in reference databases. Since so many SNPs are available, those with reasonable minor allele frequencies can be selected so that the minor allele frequencies are relatively high compared to STR alleles. This potentially renders sampling bias issues mute and allows for the use of smaller reference databases in identity and racial exclusion calculation. Reference database sizes being equal, the statistical power of SNP-based identity determination and racial inference is likely to be greater due to the sheer number of SNPs that can be used.

[0245] On top of these statistical advantages, recent advances in high-throughput genotyping technologies have made SNPs technically and economically more attractive for use in identity testing. Until recently, small numbers of complex alleles have been preferred over large numbers of less complex loci due to the expense and technical difficulty in running multiple tests on single specimens. Given the recent technological advancements that reduce the expense of typing multiple markers in individual samples, the current rate limiting step in forensic molecular biology is no longer the number of sites that can be economically typed in each sample, but the number of individuals that can be tested. With STR markers, several thousand specimens are required in each population to accurately estimate allele frequencies (and other parameters), and this problem is greater the larger the number of possible alleles per locus, and the rarer the minor allele(s) in a given population. With SNP markers, this is less of an issue because so many SNPs are available for typing that batteries of SNPs with reasonable pan-racial minor allele frequencies can be pre-selected. For these reasons, it is likely that identity determination of the future, at some level, will involve SNP typing. Probably the most significant barrier remaining for the use of SNPs in forensic identity testing is not scientific or technical, but commercial inertia; new equipment will have to be purchased, new databases constructed and new assays validated. However, none of these factors is significant enough to justify the use of an inferior methodology, particularly when human lives are in the balance.

[0246] Though SNP based identity testing appears to the wave of the future, relatively few SNP based human identity testing products have yet been developed and/or published. Further, no SNP based tests have yet been described that are capable of accurately inferring the racial origin of a DNA specimen. The invention provides a panel of 64 “Significant markers of race,” which are SNPs whose association with a particular race of a subject is strong enough to be detected using simple genetics approaches. As illustrated in Example 14, significant markers of race show a race-biased frequency distribution. Significant markers of race can also be referred to as “race-related SNPs.”

[0247] A method according to this aspect of the invention that relates to an inference of race includes methods wherein the nucleotide occurrence of at least 2 race-related SNPs are identified. In these embodiments, to increase the power of the inference, the method can further comprise grouping the identified nucleotide occurrences of the race-related SNPs into one or more race-related haplotype alleles, which exhibit a race-biased frequency distribution.

[0248] To determine whether SNPs or haplotypes are race-related, numerous statistical analysis can be performed, similar to those described above related to pigmentation-related haplotypes. Allele frequencies can be calculated for haplotypes and pair-wise haplotype frequencies estimated using an EM algorithm (Excoffier and Slatkin 1995). Linkage disequilibrium coefficients can then be calculated. In addition to various parameters such as linkage disequilibrium coefficients, allele and haplotype frequencies (within ethnic, control and case groups), chi-square statistics and other population genetic parameters such as Panmitic indices can be calculated to control for ethnic, ancestral or other systematic variation between the case and control groups.

[0249] Markers/haplotypes with value for distinguishing the case matrix from the control, if any, can be presented in mathematical form describing any relationship and accompanied by association (test and effect) statistics. A statistical analysis result which shows an association of a SNP marker or a haplotype with a pigmentation trait with at least 80%, 85%, 90%, 95%, or 99%, most preferably 95% confidence, or alternatively a probability of insignificance less than 0.05. These statistical tools may test for significance related to a null hypothesis that an on-test SNP allele or haplotype allele is not significantly different between individuals of different races.

[0250] The panel of significant markers of race provided herein in Example 14, are SNP markers in the major human pigmentation and xenobiotic metabolism genes, as well as other genes, that can be used to infer the ethnic origin of a DNA specimen with near perfect accuracy in a sample of Asian, African, and Caucasian descent. We also present herein in Example 17, a series of penetrant haplotypes and a series of latent haplotypes for eye color. The SNPs of these penetrant and latent haplotypes are also significant markers of race, and can be used to infer the race of a subject with near perfect accuracy. To improve the power of the inference even further, the combination of haplotypes of Example 17, which includes these SNPs, can be used to infer race.

[0251] The race-related gene of the methods of this aspect of the invention can include a pigmentation gene or a xenobiotic gene, or any other gene in which a statistically significant association with a particular race or group of races (e.g., Asian and African populations) for a nucleotide occurrence of a SNP or a haplotype occurring within the gene, is observed. Race-related SNPs are SNPs with genotype distributions and allele frequencies that are statistically different between the three ethnic groups (See e.g., Example 14). Minor alleles for each of these 68 SNP markers were preferentially represented in one of the three major racial groups tested (Asians, African Americans or Caucasians) and many of these SNPs showed dramatic differences between the groups. All three of the possible preference categories are observed; preferentially present in the Caucasian population, preferentially present in the Asian population, and preferentially present in the African American population.

[0252] The race-related gene can include at least one of oculocutaneous albinism II (OCA2), agouti signaling protein (ASIP), CYP2D6, tyrosinase-related protein 1 (TYRP1), cytochrome p450-2 (CYP2C9), cytochrome p450-3 (CYP3A4), tyrosinase (TYR), melanocortin-1 receptor (MCV1R), adaptor-related protein complex 3, beta 1 subunit (AP3B1), AP3D1, dopachrome tautomerase (DCT), silver homolog (SILV), AIM-1 protein (LOC51151), proopiomelanocortin (POMC), ocular albinism 1 (OA1), microphthalmiated associated transcription factor (MITF), myosin VA (MYO5A), RAB27A, coagulation factor II (thrombin) receptor-like 1 (F2RL1), HMG CoA reductase (HMGCR), famesyl diphosphate synthase (FDPS), aryl hydrocarbon reductase (AHR), or cytochrome p450-1 CYP1A1), or any combination thereof.

[0253] This method can further include in the nucleic acid sample at least one nucleotide occurrence for at least a second race-related SNP of at least a second race-related gene. The second race-related gene can be OCA2, ASIP, TYRP1, TYR, AP3B1, AP3D1, DCT, SILV, LOC51151, POMC, OA1, MITF, MYO5A, RAB27A, F2RL1, melanocortin-1 receptor (MC1R), CYP2D6, CYP2C9, CYP3A4, AP3B1, HMGCR, FDPS, AHR, or CYP1 A1, or any combination thereof.

[0254] Of these race-related genes listed above OCA2, SILV, ASIP, TYRP1, DCT, TRY, MC1R, and AP3B1 are pigmentation genes; AHR and CYP1A1 are xenobiotic genes; and CYP2D6, CYP2C9, CYP3A4, HMGCR, and FDPS, are neither pigmentation nor xenobiotic genes.

[0255] Though SNPs and/or haplotypes in many genes could reasonably be expected to be associated with a particular race or group of races, the present disclosure reveals that pigmentation genes and xenobiotic genes appear to include an unusually large number of significant markers of race, and these markers are strong indicators of race, as illustrated in Example 14. That is, the present disclosure reveals that the pigmentation and xenobiotic genes appear to be sinks for accumulating these kinds of SNPs over evolutionary time. Therefore, the race-related gene in this aspect of the invention can include one or more pigmentation gene and/or one or more xenobiotic genes.

[0256] The race-related SNPs disclosed herein not only can be useful for inferring race but can be useful for inferring pigmentation traits through correlation.

[0257] The attached Examples such as Example 14, illustrate methods of inferring an individual's race. Methods of Examples, such as Example 17, which infer a pigmentation-trait can be used to infer race by substituting known race relationships for known pigmentation-trait relationships. The inference typically involves using a complex model that involves using known relationships of known alleles or nucleotide occurrences as classifiers. As illustrated in Example 17, the inference can be drawn by applying data regarding the subject s race-related haplotype allele(s) to a complex model that makes a blind, quadratic discriminate classification using a variance-covariance matrix. Various classification models are discussed in more detail herein, and illustrated in the Examples.

[0258] A method according to this aspect of the invention that relates to an inference of race includes methods wherein the nucleotide occurrence of at least 2 race-related SNPs are identified. In these embodiments, to increase the power of the inference, the method can further comprise grouping the identified nucleotide occurrences of the race-related SNPs into one or more race-related haplotype alleles, wherein the relationship of the haplotype alleles to race is known.

[0259] In this aspect of the invention, the race-related haplotype can be at least one of the following race-related haplotypes:
[0260] a) nucleotides of the DCT gene corresponding to a DCT-A haplotype, which includes: nucleotide 27585 of SEQ ID NO:226 [702], nucleotide 8298 of SEQ ID NO:226 [650], and nucleotide 32086 of SEQ ID NO:226 [marker 675];
[0261] b) nucleotides of the MCV1R gene corresponding to an MC1R-A haplotype, which includes: nucleotide 915 of SEQ ID NO:228 [217438], nucleotide 1092 of SEQ ID NO:228 [217439], and nucleotide 1119 of SEQ ID NO:228 [217441]; or c) nucleotides of the OCA2 gene corresponding to an OCA2-A haplotype, which includes: nucleotide 132483 of SEQ ID NO:225 [217458], nucleotide 141832 of SEQ ID NO:225 [886894], nucleotide 114220 of SEQ ID NO:225 [marker 886895], and nucleotide 114307 of SEQ ID NO:225 [marker 886896];
[0262] d) nucleotides of the OCA2 gene corresponding to an OCA2-B haplotype, which includes: nucleotide 84355 of SEQ ID NO:225 [marker 217452]], nucleotide 418566 of SEQ ID NO:225 [marker 712052], and nucleotide 113047 of SEQ ID NO:225 [marker 886994];
[0263] e) nucleotides of the OCA2 gene corresponding to an OCA2-C haplotype, which includes: nucleotide 75403 of SEQ ID NO:225 [712057], nucleotide 144364 of SEQ ID NO:225 [712058], nucleotide 210654 of SEQ ID NO:225 [712060], and nucleotide 147364 of SEQ ID NO:225, [712064]
[0264] f) nucleotides of the OCA2 gene, corresponding to an OCA2-D haplotype, which includes: nucleotide 193050 of SEQ ID NO:225, [712054], nucleotide 67333 of SEQ ID NO:225, [712056], and nucleotide 147516 of SEQ ID NO:225, [886892.];
[0265] g) nucleotides of the OCA2 gene, corresponding to an OCA2-E haplotype, which includes: nucleotide 108632 of SEQ ID NO:225, [217455], nucleotide 108680 of SEQ ID NO:225, [712061], and nucleotide 147516 of SEQ ID NO:225, [886892]; or
[0266] h) nucleotides of the TYRP1 gene corresponding to a TYRP1-B haplotype which includes: nucleotide 11359 of SEQ ID NO:227, [886938], nucleotide 14903 of SEQ ID NO:227; [886943], or any combination of a) through h).
   To improve the power of the inference, in methods of this aspect of the invention involving the race-related haplotypes above, these race-related haplotype can further include at least one of the following haplotypes:
[0267] i) nucleotides of the ASIP gene corresponding to a ASIP-A haplotype, which comprises: nucleotide 429 of SEQ ID NO:227 [marker 552], and nucleotide 3037 of SEQ ID NO:227 [marker 468];
[0268] j) nucleotides of the DCT gene corresponding to a DCT-B haplotype, which comprises: nucleotide 27427 of SEQ ID NO:226 [marker 710], and nucleotide 2543 of SEQ ID NO:226 [marker 657];
[0269] k) nucleotides of the SILV gene corresponding to a SILV-A haplotype, which comprises: nucleotide 11799 of SEQ ID NO:230 [marker 656], and nucleotide 8481 of SEQ ID NO:230;
[0270] l) nucleotides of the TYR gene corresponding to a TYR-A haplotype, which comprises: nucleotide 106523 of SEQ ID NO:231 [marker 278], and nucleotide 107830 of SEQ ID NO:231 [marker 386]; or
[0271] m) nucleotides of the TYRP1 gene corresponding to a TYRP1-A haplotype, which comprises: nucleotide 15939 of SEQ ID NO:227 [marker 217485], nucleotide 4998 of SEQ ID NO:227 [marker 886933], and nucleotide 5463 of SEQ ID NO:227 [marker 886937], or any combination of i) through m).

[0272] In methods of this aspect of the invention involving the preferred race-related haplotypes and preferred race-related haplotypes, at least one race-related haplotype allele includes a combination of haplotype alleles of the MC1R-A haplotype, the OCA2-A haplotype, the OCA2-B haplotype, the OCA2-C haplotype, the OCA2-D haplotype, the OCA2-E haplotype, the TYRP1-B haplotype, and the DCT-B haplotype. By way of a preferred example, in these methods the at least one haplotype allele of a)-m) above can include at least one haplotype allele in each of the ASIP-A haplotype, the DCT-B haplotype, the SILV-A haplotype, the TYR-A haplotype, and the TYRP1-A haplotype.

[0273] In certain methods involving the race-related haplotypes disclosed above, the race-related haplotype allele is a combination of haplotype alleles that includes:
[0274] a) the MC1R-A haplotype allele CCC;
[0275] b) the OCA2-A haplotype allele TTAA, CCAG, or TTAG;
[0276] c) the OCA2-B haplotype allele CAA, CGA, CAC, or CGC;
[0277] d) the OCA2-C haplotype allele GGAA, TGAA, or TAAA;
[0278] e) the OCA2-D haplotype allele AGG or GGG;
[0279] f) the OCA2-E haplotype allele GCA;
[0280] g) the TYRP1-B haplotype allele TC; and
[0281] h) the DCTB gene haplotype allele CTG or GTG

[0282] Furthermore, to further improve the inference power, this method that includes all the haplotypes for race, can further include a combination of haplotype alleles that includes,
[0283] i) the ASIP-A haplotype allele ‘GT’ or ‘AT’;
[0284] j) the DCT-B haplotype allele ‘TA’ or ‘TG’;
[0285] k) the SILV-A haplotype allele ‘TC’ or ‘CC’;
[0286] l) the TYR-A haplotype allele ‘GA’, ‘AA’ or ‘GG’; and
[0287] m) the TYRP1-B haplotype allele ‘GTG’, ‘GTT’ or ‘TTT’.

[0288] By way of another example, a method according to this aspect of the invention can include determining the nucleotide occurrence for at least one of the SNPs disclosed herein as segregating preferentially with eye shade or hair shade. These SNPs include: nucleotide 27585 of SEQ ID NO:226 [marker 702], nucleotide 8298 of SEQ ID NO:226 [marker 650], nucleotide 32086 of SEQ ID NO:226 [marker 675], nucleotide 915 of SEQ ID NO:228 [marker 217438], nucleotide 1092 of SEQ ID NO:228 [marker 217439], nucleotide 1119 of SEQ ID NO:228 [marker 217441]; nucleotide 132483 of SEQ ID NO:225 [marker 217458], nucleotide 141832 of SEQ ID NO:225 [marker 886894], nucleotide 114220 of SEQ ID NO:225 [marker 886895], nucleotide 114307 of SEQ ID NO:225 [marker 886896], nucleotide 84355 of SEQ ID NO:225 [217452], nucleotide 418566 of SEQ ID NO:225 [712052], nucleotide 113047 of SEQ ID NO:225 [marker 886994], nucleotide 75403 of SEQ ID NO:225 [marker 712057], nucleotide 144364 of SEQ ID NO:225 [marker 712058], nucleotide 210654 of SEQ ID NO:225 [marker 712060], nucleotide 147364 of SEQ ID NO:225 [marker 712064], nucleotide 193050 of SEQ ID NO:225 [marker 712054], nucleotide 67333 of SEQ ID NO:225 [marker 712056], nucleotide 147516 of SEQ ID NO:225 [marker 886892], nucleotide 108632 of SEQ ID NO:225 [marker 217455], nucleotide 108680 of SEQ ID NO:225 [marker 712061], nucleotide 147516 of SEQ ID NO:225 [marker 886892], nucleotide 11359 of SEQ ID NO:227 [marker 886938], nucleotide 14903 of SEQ ID NO:227 [marker 886943], nucleotide 880 of SEQ ID NO:229 [marker 560], nucleotide 429 of SEQ ID NO:227 [marker 552], nucleotide 1381 of SEQ ID NO:227 [marker 559], nucleotide 3037 of SEQ ID NO:227 [marker 468], nucleotide 2543 of SEQ ID NO:226 [marker 657], nucleotide 11764 of SEQ ID NO:226 [marker 674], nucleotide 29117 of SEQ ID NO:226 [marker 632], nucleotide 4269 of SEQ ID NO:226 [marker 701], nucleotide 27427 of SEQ ID NO:226 [marker 710]; nucleotide 114086 of SEQ ID NO:225 [marker 217456], nucleotide 11799 of SEQ ID NO:230 [marker 656], nucleotide 8481 of SEQ ID NO:230, nucleotide 8699 of SEQ ID NO:230 [marker 637], nucleotide 106523 of SEQ ID NO:231 [marker 278], nucleotide 107830 of SEQ ID NO:231 [marker 386], nucleotide 118064 of SEQ ID NO:231 [marker 217480], nucleotide 50575 of SEQ ID NO:231 [marker 951497], nucleotide 1080 of SEQ ID NO:231 [marker 217468], nucleotide 107348 of SEQ ID NO:231 [marker 217473], nucleotide 15939 of SEQ ID NO:227 [marker 217485], nucleotide 16220 of SEQ ID NO:227 [marker 217486], nucleotide 1084 of SEQ ID NO:227 [marker 869787], nucleotide 224 of SEQ ID NO:227 [marker 869745], nucleotide 4998 of SEQ ID NO:227 [marker 886933], nucleotide 5463 of SEQ ID NO:227 [marker 886937], or nucleotide 14820 of SEQ ID NO:227 [marker 886942], nucleotide 207 of SEQ ID NO:51 [marker 217459], nucleotide 428 of SEQ ID NO:52 [marker 217460], nucleotide 4998 of SEQ ID NO:227 [marker 217487], nucleotide 459 of SEQ ID NO:54 [marker 217489], nucleotide 1528 of SEQ ID NO:55 [marker 554353], nucleotide 1093 of SEQ ID NO:56 [marker 554363], nucleotide 1274 of SEQ ID NO:57 [marker 554368], nucleotide 1024 of SEQ ID NO:58 [marker 554370], nucleotide 1159 of SEQ ID NO:59 [marker 554371], nucleotide 484 of SEQ ID NO:60 [marker 615921], nucleotide 619 of SEQ ID NO:61 [marker 615925], nucleotide 551 of SEQ ID NO:62 [marker 615926], nucleotide 1177 of SEQ ID NO:63 [marker 664784], nucleotide 1185 of SEQ ID NO:64 [marker 664785], nucleotide 1421 of SEQ ID NO:65 [664793], nucleotide 1466 of SEQ ID NO:66 [marker 664802], nucleotide 1311 of SEQ ID NO:67 [marker 664803], nucleotide 808 of SEQ ID NO:68 [marker 712037], nucleotide 1005 of SEQ ID NO:69 [marker 712047], nucleotide 743 of SEQ ID NO:70 [marker 712051], nucleotide 418 of SEQ ID NO:71 [marker 712055], nucleotide 884 of SEQ ID NO:72 [marker 712059], nucleotide 744 of SEQ ID NO:73 [marker 712043], nucleotide 360 of SEQ ID NO:74 [marker 756239], nucleotide 455 of SEQ ID NO:75 [marker 756251], nucleotide 519 of SEQ ID NO:76 [marker 809125], nucleotide 277 of SEQ ID NO:77 [marker 869769], nucleotide 227 of SEQ ID NO:78 [marker 869772], nucleotide 270 of SEQ ID NO:79 [marker 869777], nucleotide 216 of SEQ ID NO:80 [marker 869784], nucleotide 172 of SEQ ID NO:81 [marker 869785], nucleotide 176 of SEQ ID NO:82 [marker 869794], nucleotide 145 of SEQ ID NO:83 [marker 869797], nucleotide 164 of SEQ ID NO:84 [marker 869798], nucleotide 166 of SEQ ID NO:85 [marker 869802], nucleotide 213 of SEQ ID NO:86 [marker 869809], nucleotide 218 of SEQ ID NO:87 [marker 869810], nucleotide 157 of SEQ ID NO:88 [marker 869813], nucleotide 837 of SEQ ID NO:89 [marker 886934], nucleotide 229 of SEQ ID NO:90 [marker 886993], nucleotide 160 of SEQ ID NO:91 [marker 951526], or any combination thereof.

[0289] By way of another example, a method according to this aspect of the invention can include determining the nucleotide occurrence for at least one of: nucleotide 915 of SEQ ID NO:228 [marker 217438], nucleotide 1092 of SEQ ID NO:228 [marker 217439], nucleotide 1119 of SEQ ID NO:228 [marker 217441]; nucleotide 141832 of SEQ ID NO:225 [marker 886894], nucleotide 114220 of SEQ ID NO:225 [marker 886895], nucleotide 114307 of SEQ ID NO:225 [marker 886896], nucleotide 84355 of SEQ ID NO:225 [217452], nucleotide 418566 of SEQ ID NO:225 [712052], nucleotide 113047 of SEQ ID NO:225 [marker 886994], nucleotide 75403 of SEQ ID NO:225 [marker 712057], nucleotide 144364 of SEQ ID NO:225 [marker 712058], nucleotide 147364 of SEQ ID NO:225 [marker 712064], nucleotide 193050 of SEQ ID NO:225 [marker 712054], nucleotide 147516 of SEQ ID NO:225 [marker 886892], nucleotide 108632 of SEQ ID NO:225 [marker 217455], nucleotide 118064 of SEQ ID NO:231 [[40]] [marker 217480], nucleotide 50575 of SEQ ID NO:231 [[41]] [marker 951497], nucleotide 1080 of SEQ ID NO:231 [[42]] [marker 217468], nucleotide 107348 of SEQ ID NO:231 [[43]] [marker 217473], nucleotide 15939 [[364]] of SEQ ID NO:227 [[ ]] [marker 217485], nucleotide 16220 [[473]] of SEQ ID NO:227 [[45]] [marker 217486], nucleotide 1084 [[314]] of SEQ ID NO:227 [[46]] [marker 869787], nucleotide 224 of SEQ ID NO:227 [[47]] [marker 869745], nucleotide 4998 of SEQ ID NO:227 [[48]] [marker 886933], nucleotide 5463 [[214]] of SEQ ID NO:227 [[49]] [marker 886937], nucleotide 207 of SEQ ID NO:51 [marker 217459], nucleotide 428 of SEQ ID NO:52 [marker 217460], nucleotide 4998 [[422]] of SEQ ID NO:227 [[48]] [marker 217487], nucleotide 459 of SEQ ID NO:54 [marker 217489], nucleotide 1528 of SEQ ID NO:55 [marker 554353], nucleotide 1093 of SEQ ID NO:56 [marker 554363], nucleotide 1274 of SEQ ID NO:57 [marker 554368], nucleotide 1024 of SEQ ID NO:58 [marker 554370], nucleotide 1159 of SEQ ID NO:59 [marker 554371], nucleotide 484 of SEQ ID NO:60 [marker 615921], nucleotide 619 of SEQ ID NO:61 [marker 615925], nucleotide 551 of SEQ ID NO:62 [marker 615926], nucleotide 1177 of SEQ ID NO:63 [marker 664784], nucleotide 1185 of SEQ ID NO:64 [marker 664785], nucleotide 1421 of SEQ ID NO:65 16647931, nucleotide 1466 of SEQ ID NO:66 [marker 664802], nucleotide 1311 of SEQ ID NO:67 [marker 664803], nucleotide 808 of SEQ ID NO:68 [marker 712037], nucleotide 1005 of SEQ ID NO:69 [marker 712047], nucleotide 743 of SEQ ID NO:70 [marker 712051], nucleotide 418 of SEQ ID NO:71 [marker 712055], nucleotide 884 of SEQ ID NO:72 [marker 712059], nucleotide 744 of SEQ ID NO:73 [marker 712043], nucleotide 360 of SEQ ID NO:74 [marker 756239], nucleotide 455 of SEQ ID NO:75 [marker 756251], nucleotide 519 of SEQ ID NO:76 [marker 809125], nucleotide 277 of SEQ ID NO: 77 [marker 869769], nucleotide 227 of SEQ ID NO:78 [marker 869772], nucleotide 270 of SEQ ID NO:79 [marker 869777], nucleotide 216 of SEQ ID NO:80 [marker 869784], nucleotide 172 of SEQ ID NO:81 [marker 869785], nucleotide 176 of SEQ ID NO: 82 [marker 869794], nucleotide 145 of SEQ ID NO:83 [marker 869797], nucleotide 164 of SEQ ID NO:84 [marker 869798], nucleotide 166 of SEQ ID NO:85 [marker 869802], nucleotide 213 of SEQ ID NO:86 [marker 869809], nucleotide 218 of SEQ ID NO:87 [marker 869810], nucleotide 157 of SEQ ID NO:88 [marker 869813], nucleotide 837 of SEQ ID NO:89 [marker 886934], nucleotide 229 of SEQ ID NO:90 [marker 886993], nucleotide 160 of SEQ ID NO:91 [marker 951526], or any combination thereof. Example 14 discloses that the panel of 64 SNPs listed above can be used to infer the ethnic origin of a DNA specimen with near perfect accuracy in a sample of Asian, African, and Caucasian descent.

[0290] The invention also relates to a method for classifying an individual as being a member of a group sharing a common characteristic. Such a method can be performed, for example, by identifying a nucleotide occurrence of a SNP in a polynucleotide of the individual, wherein the SNP corresponds to nucleotide 16220 [[473]] of SEQ ID NO:227 [[45]] [marker 217486], nucleotide 224 of SEQ ID NO:227 [[47]] [marker 869745], nucleotide 1084 [[314]] of SEQ ID NO:227 [[46]] [marker 869787], nucleotide 147516 of SEQ ID NO:225 [marker 886892], nucleotide 114220 of SEQ ID NO:225 [marker 886895], nucleotide 114307 of SEQ ID NO:225 [marker 886896], nucleotide 4998 of SEQ ID NO:227 [[48]] [marker 886933], nucleotide 5463 of SEQ ID NO:227 [[49]] [marker 886937], nucleotide 113047 of SEQ ID NO:225 [marker 886994], nucleotide 141832 of SEQ ID NO:225 [marker 886894], nucleotide 11359 of SEQ ID NO:227 [marker 886938], nucleotide 14903 of SEQ ID NO:227 [[24]] [marker 886943], or nucleotide 14820 of SEQ ID NO:227 [marker 886942], or any combination thereof.

[0291] Methods described above for identifying a SNP can be used to identify an occurrence of a polynucleotide in a SNP for this aspect of the invention. For example, a method according to this aspect of the invention can include an amplification reaction, a primer extension reaction, or an immunoassay to identify the nucleotide occurrence of the SNP.

[0292] In another aspect the invention provides a method for detecting a nucleotide occurrence for a single nucleotide polymorphism (SNP) of a human pigmentation gene. The method includes:
[0293] i) incubating a sample that includes a polynucleotide with a specific binding pair member, wherein the specific binding pair member specifically binds at or near a polynucleotide suspected of being polymorphic, wherein the polynucleotide comprises one of the nucleotide occurrences corresponding to at least one of nucleotide 16220 [[473]] of SEQ ID NO:227 [[45]] [marker 217486], nucleotide 224 of SEQ ID NO:227 [[47]] [marker 869745], nucleotide 1084 [[314]] of SEQ ID NO:227 [[46]] [marker 869787], nucleotide 147516 of SEQ ID NO:225 [marker 886892], nucleotide 114220 of SEQ ID NO:225 [marker 886895], nucleotide 114307 of SEQ ID NO:225 [marker 886896], nucleotide 4998 of SEQ ID NO:227 [[48]] [marker 886933], nucleotide 5463 [[214]] of SEQ ID NO:227 [[49]] [marker 886937], nucleotide 113047 of SEQ ID NO:225 [marker 886994], nucleotide 141832 of SEQ ID NO:225 [marker 886894], nucleotide 11359 of SEQ ID NO:227 [marker 886938], nucleotide 14903 of SEQ ID NO:227 [[24]] [marker 886943], or nucleotide 14820 of SEQ ID NO:227 [marker 886942], or any combination thereof, and
[0294] ii) detecting selective binding of the specific binding pair member.

[0295] Selective binding is indicative of the presence of the nucleotide occurrence. The nucleotide occurrence for the polymorphism can be detected.

[0296] In another aspect the invention provides an isolated primer pair for determining a nucleotide occurrence of a single nucleotide polymorphism (SNP) in a polynucleotide. A forward primer of the primer pair binds the polynucleotide upstream of the SNP position on one strand and a reverse primer binds the polynucleotide upstream of the SNP position on a complementary strand. For this aspect of the invention the SNP position corresponds to nucleotide 16220 [[473]] of SEQ ID NO:227 [[45]] [marker 217486], nucleotide 224 of SEQ ID NO:227 [[47]] [marker 869745], nucleotide 1084 [[314]] of SEQ ID NO:227 [[46]] [marker 869787], nucleotide 147516 of SEQ ID NO:225 [marker 886892], nucleotide 114220 of SEQ ID NO:225 [marker 886895], nucleotide 114307 of SEQ ID NO:225 [marker 886896], nucleotide 4998 of SEQ ID NO:227 [[48]] [marker 886933], nucleotide 5463 [[214]] of SEQ ID NO:227 [[49]] [marker 886937], nucleotide 113047 of SEQ ID NO:225 [marker 886994], nucleotide 141832 of SEQ ID NO:225 [marker 886894], nucleotide 11359 of SEQ ID NO:227 [marker 886938], nucleotide 14903 of SEQ ID NO:227 [[24]] [marker 886943], or nucleotide 14820 of SEQ ID NO:227 [marker 886942]. The primer pair can be used in an amplification reaction as described above, as is well known in the art.

[0297] In another aspect, the invention provides an isolated specific binding pair member for determining a nucleotide occurrence of a single-nucleotide polymorphism (SNP) in a polynucleotide. The specific binding pair member for this aspect of the invention specifically binds to the polynucleotide at or near nucleotide 16220 [[473]] of SEQ ID NO:227 [[45]] [marker 217486], nucleotide 224 of SEQ ID NO:227 [[47]] [marker 869745], nucleotide 1084 [[314]] of SEQ ID NO:227 [[46]] [marker 869787], nucleotide 147516 of SEQ ID NO:225 [marker 886892], nucleotide 114220 of SEQ ID NO:225 [marker 886895], nucleotide 114307 of SEQ ID NO:225 [marker 886896], nucleotide 4998 of SEQ ID NO:227 [[48]] [marker 886933], nucleotide 5463 [[214]] of SEQ ID NO:227 [[49]] [marker 886937], nucleotide 113047 of SEQ ID NO:225 [marker 886994], nucleotide 141832 of SEQ ID NO:225 [marker 886894], nucleotide 11359 of SEQ ID NO:227 [marker 886938], nucleotide 14903 of SEQ ID NO:227 [[24]] [marker 886943], or nucleotide 14820 of SEQ ID NO:227 [marker 886942].

[0298] The specific binding pair member can be used to identify the nucleotide occurrence at a SNP, for example a pigmentation-related SNP using methods described above for identifying SNPs. Many types of specific binding pair members are known in the art. The specific binding pair member can be a polynucleotide probe, an antibody, or a substrate for a primer extension reaction. For methods wherein the specific binding pair member is a substrate for a primer extension reaction, the specific binding pair member is a primer that binds to a polynucleotide at a sequence comprising the SNP as the terminal nucleotide. As discussed above, methods such as SNP-IT (Orchid BioSciences), utilize primer extension reactions using a primer whose terminal nucleotide binds selectively to certain nucleotides at a SNP loci, to identify a nucleotide occurrence at the SNP loci.

[0299] In another aspect, the invention provides an isolated polynucleotide that includes at least 30 nucleotides of the human OCA2 gene, where the polynucleotide includes one or more of a thymidine residue at a nucleotide corresponding to nucleotide 141832 of SEQ ID NO:225 [marker 886894], a guanidine residue at a nucleotide corresponding to nucleotide 114220 of SEQ ID NO:225 [marker 886895], a cytidine residue at a nucleotide corresponding to nucleotide 147516 of SEQ ID NO:225 [marker 886892], a thymidine residue at a nucleotide corresponding to nucleotide 114307 of SEQ ID NO:225 [marker 886896], a adenosine residue at a nucleotide corresponding to nucleotide 113047 of SEQ ID NO:225 [marker 886994], or a combination thereof. In certain embodiments of this aspect of the invention, the isolated polynucleotide can be 50, 100, 150, 200, 250, 500, 1000, etc. nucleotides in length. In certain embodiments of this aspect of the invention, the isolated polynucleotide can be at least 50, at least 100, at least 150, at least 200, at least 250, at least 500, at least 1000, etc. nucleotides in length.

[0300] In another aspect, the invention provides an isolated polynucleotide comprising at least 30 nucleotides of the human TYRP gene, wherein the polynucleotide includes one or more of a thymidine residue at a nucleotide corresponding to nucleotide 11359 of SEQ ID NO:227 [marker 886938], a thymidine residue at a nucleotide corresponding to nucleotide 14903 of SEQ ID NO:227 [[24]] [marker 886943], a thymidine residue at a nucleotide corresponding to nucleotide 16220 [[473]] of SEQ ID NO:227 [[45]] [marker 217486], a cytidine residue at a nucleotide corresponding to nucleotide 224 of SEQ ID NO:227 [[47]] [marker 869745], a guanidine residue at a nucleotide corresponding to nucleotide 1084 [[314]] of SEQ ID NO:227 [[46]] [marker 869787], a cytidine residue at a nucleotide corresponding to nucleotide 4998 of SEQ ID NO:227 [[48]] [marker 886933], a thymidine residue at a nucleotide corresponding to nucleotide 5463 [[214]] of SEQ ID NO:227 [[49]] [marker 886937], a adenosine residue at a nucleotide corresponding to nucleotide 14820 of SEQ ID NO:227 [marker 886942], or a combination thereof. In certain embodiments of this aspect of the invention, the isolated polynucleotide can be 50, 100, 150, 200, 250, 500, 1000, etc. nucleotides in length. In certain embodiments of this aspect of the invention, the isolated polynucleotide can be at least 50, at least 100, at least 150, at least 200, at least 250, at least 500, at least 1000, etc. nucleotides in length.

[0301] In another aspect, the invention provides an isolated polynucleotide at least 30 nucleotides in length, wherein the isolated polynucleotide includes:
[0302] a) a segment of the DCT gene wherein nucleotides CTG or GTG occur at positions corresponding to nucleotide 27585 of SEQ ID NO:226 [marker 702], nucleotide 8298 of SEQ ID NO:226 [marker 650], and nucleotide 32086 of SEQ ID NO:226 [marker 675] [marker 675], respectively;
[0303] b) a segment of the MC1R gene wherein nucleotides CCC, CTC, TCC or CCT occur at positions corresponding to nucleotide 915 [[442]] of SEQ ID NO:228 [[ ]] [217438], nucleotide 1092 of SEQ ID NO:228 [217439], and nucleotide 1119 of SEQ ID NO:228 [217441], respectively;
[0304] c) a segment of the OCA2 gene wherein nucleotides TTAA, CCAG, or TTAG occur at positions corresponding to nucleotide 132483 of SEQ ID NO:225 [217458], nucleotide 141832 of SEQ ID NO:225 [886894], nucleotide 114220 of SEQ ID NO:225 [886895], and nucleotide 114307 of SEQ ID NO:225 [886896], respectively;
[0305] d) a segment of the OCA2 gene wherein nucleotides CAA, CGA, CAC, or CGC occur at positions corresponding to nucleotide 84355 of SEQ ID NO:225 [217452], nucleotide 418566 of SEQ ID NO:225 [712052], and nucleotide 113047 of SEQ ID NO:225 [886994], respectively;
[0306] e) a segment of the OCA2 gene wherein nucleotides GGAA, TGAA, and TAAA occur at positions corresponding to nucleotide 75403 of SEQ ID NO:225 [[14]] [712057], nucleotide 144364 of SEQ ID NO:225 [712058], nucleotide 210654 [[418]] of SEQ ID NO:225 [712060], and nucleotide 147364 of SEQ ID NO:225 [712064], respectively;
[0307] f) a segment of the OCA2 gene wherein nucleotides AGG or GGG occur at positions corresponding to nucleotide 193050 of SEQ ID NO:225 [712054], nucleotide 67333 [[554]] of SEQ ID NO:225 [712056], and nucleotide 147516 of SEQ ID NO:225 [886892], respectively;
[0308] g) a segment of the OCA2 gene wherein nucleotides GCA occur at positions corresponding to nucleotide 108632 of SEQ ID NO:225 [217455], nucleotide 108680 of SEQ ID NO:225 [712061], and nucleotide 147516 of SEQ ID NO:225 [886892], respectively; or
[0309] h) a segment of the TYRP1 gene wherein nucleotides TC occur at positions corresponding to nucleotide 11359 of SEQ ID NO:227 [886938], and nucleotide 14903 of SEQ ID NO:227 [[24]] [886943], respectively. This isolated nucleotide includes the alleles for penetrant eye color or eye shade haplotypes. In certain examples, the isolated polynucleotide is derived from the OCA2 gene and includes any combination of c-g.

[0310] In another aspect, the invention provides an isolated polynucleotide at least 30 positions in length, wherein the isolated polynucleotide includes:
[0311] a) a segment of the ASIP gene wherein nucleotides GT or AT occur at positions corresponding to nucleotide 429 of SEQ ID NO:227 [552], and nucleotide 3037 of SEQ ID NO:227 [468], respectively;
[0312] b) a segment of the DCT gene wherein nucleotides TA or TG occur at positions corresponding to nucleotide 27427 [[451]] of SEQ ID NO:226 [710], and nucleotide 2543 of SEQ ID NO:226 [657], respectively;
[0313] c) a segment of the SILV gene wherein nucleotides TC, TT, or CC occur at positions corresponding to nucleotide 11799 of SEQ ID NO:230 [656], and nucleotide 8481 of SEQ ID NO:230 [662], respectively;
[0314] d) a segment of the TYR gene wherein nucleotides GA, AA, or GG occur at positions corresponding to nucleotide 106523 of SEQ ID NO:231 [278], and nucleotide 107830 of SEQ ID NO:231 [386], respectively; or
[0315] e) a segment of the TYRP1 gene wherein nucleotides GTG, TTG, or GTT occur at positions corresponding to nucleotide 15939 [[442]] of SEQ ID NO:227 [[44]] [217485], nucleotide 4998 [[442]] of SEQ ID NO:227 [[48]] [886933], and nucleotide 5463 [[442]] of SEQ ID NO:227 [[49]] [886937], respectively.

[0316] This isolated polynucleotide includes the alleles for latent eye color or eye shade haplotypes. In certain embodiments of this aspect of the invention, the isolated polynucleotide can be 50, 100, 150, 200, 250, 500, 1000, etc. nucleotides in length.

[0317] In another aspect, the invention provides an isolated polynucleotide at least 30 positions in length, which includes:
[0318] a) a segment of the ASIP gene wherein nucleotides GA or AA occur at positions corresponding to nucleotide 1381 of SEQ ID NO:227 [559], and nucleotide 880 of SEQ ID NO:229 [560], respectively;
[0319] b) a segment of the MC1R gene wherein nucleotides CCC, CTC, TCC or CCT occur at positions corresponding to nucleotide 915 [[442]] of SEQ ID NO:228 [[ ]] [217438], nucleotide 1092 of SEQ ID NO:228 [217439], and nucleotide 1119 of SEQ ID NO:228 [217441], respectively;
[0320] c) a segment of the OCA2 gene wherein nucleotides AGG or AGA occur at positions corresponding to nucleotide 210654 [[418]] of SEQ ID NO:225 [712060], nucleotide 147516 of SEQ ID NO:225 [886892], and nucleotide 114307 of SEQ ID NO:225 [886896], respectively;
[0321] d) a segment of the OCA2 gene wherein nucleotides AGT or ATT occur at positions corresponding to nucleotide 108632 of SEQ ID NO:225 [217455], nucleotide 75403 of SEQ ID NO:225 [[14]] [712057], and nucleotide 141832 of SEQ ID NO:225 [886894], respectively;
[0322] e) a segment of the OCA2 gene wherein nucleotides TG occur at positions corresponding to nucleotide 132483 of SEQ ID NO:225 [217458], and nucleotide 67333 [[554]] of SEQ ID NO:225 [712056], respectively;
[0323] f) a segment of the OCA2 gene wherein nucleotides GA or AA occur at positions corresponding to nucleotide 193050 of SEQ ID NO:225 [712054], and nucleotide 114220 of SEQ ID NO:225 [886895], respectively; or
[0324] g) a segment of the TYRP gene wherein nucleotides AA or TA occur at positions corresponding to nucleotide 16220 [[442]] of SEQ ID NO:227 [[45]] [217486], and nucleotide 5463 [[442]] of SEQ ID NO:227 [[49]] [886937], respectively, or any combination thereof.
[0325] i) identifying a candidate SNP of a pigmentation-related-gene or a race-related gene;
[0326] ii) determining that the SNP has a genotype class comprising alleles exhibiting a coherent inheritance pattern, and a minor allele frequency that is greater than 0.01 in at least one race, thereby identifying a validated SNP;
[0327] iii) determining that the validated SNP exhibits significantly different genotype distributions and allele frequencies between individuals of different pigmentation phenotypes or racial classes, thereby identifying a pigmentation-related or race-related SNP.

[0328] This isolated nucleotide includes one or any combination of alleles for penetrant eye color or eye shade haplotypes. In certain examples, the isolated polynucleotide is derived from the OCA2 gene and includes any combination of c-f. In certain embodiments of this aspect of the invention, the isolated polynucleotide can be 50, 100, 150, 200, 250, 500, 1000, etc. nucleotides in length. In certain embodiments of this aspect of the invention, the isolated polynucleotide can be at least 50, at least 100, at least 150, at least 200, at least 250, at least 500, at least 1000, etc. nucleotides in length.

[0329] In another aspect, the invention provides a method for identifying genes, including pigmentation genes, SNPs, SNP alleles, haplotypes, and haplotype alleles that are statistically associated with a pigmentation trait. This aspect of the invention provides commercially valuable research tools, for example. The approach can be performed generally as follows:
[0330] 1) Select genes from the human genome database that are likely to be involved in the synthesis, degradation and deposition of melanin;
[0331] 2) Identify the common genetic variations in the selected genes by designing primers to flank each promoter, exon and 3′ UTR for each of the genes; amplifying and sequencing the DNA corresponding to each of these regions in enough donors of varying ethnic backgrounds to provide a statistically significant sample (e.g., approximately 500 multi-ethnic donors); and utilizing an algorithm to compare the sequences to one another in order to identify the positions within each region of each gene that are variable in the population, to produce a gene map for each of the relevant genes;
[0332] 3) Use the gene maps to design and execute large-scale genotyping experiments, whereby a significant number of individuals, typically at least one hundred, more preferably at least two hundred individuals, of known hair, eye and skin color (and ethnicity) are scored for the polymorphisms; and
[0333] 4) Use the results obtained in step 3) to identify genes, polymorphisms, and sets of polymorphisms, including haplotypes, that are quantitatively and statistically associated with pigmentation.

[0334] Examples 4, 14, and 17, illustrate general approaches for discovering pigmentation-related SNPs and SNP alleles as provided above. For example, pigmentation-related SNPs and SNP alleles can be discovered using DNA from blood samples of patients exhibiting variable eye, skin and skin pigmentation levels (colors). Data on eye color, hair color, skin color, and race can also be collected and analyzed for patients providing the blood samples. Assays for identifying the alleles of a SNP or a SNP candidate can be performed using, for example, an Orchid SNPstream 25K instrument (Orchid BioSciences, Inc., Princeton, N.J.) for high throughput genotyping. Other assays known in the art, as described above for identifying nucleic acid occurrences at SNPs can be used for this step, as will be readily apparent to a skilled artisan.

[0335] Specimens from patient samples can be used as a template for amplification using a polymerase, such as of Pfu turbo thermostable DNA polymerase, Taq polymerase, or a combination thereof. Amplification can be performed using standard conditions. For example, amplification can be performed in the presence of 1.5 mM MgCl₂, 5 mM KCl, 1 mM Tris, pH 9.0, and 0.1% Triton X-100 nonionic detergent. Amplification products can be cloned into a T-vector using the Clontech (Palo Alto Calif.) PCR Cloning Kit, transformed into Calcium Chloride Competent cells (Stratagene; La Jolla Calif.), plated on LB-ampicillin plates, and grown overnight.

[0336] Clones can be selected from each plate, isolated by mini-prep using the Promega Wizard or Qiagen Plasmid Purification Kit, and sequenced using standard methods, such as using PE Applied Biosystems Big Dye Terminator Sequencing Chemistry. Sequences can be trimmed of vector sequence and quality trimmed, and deposited into an Internet based relational database system.

[0337] Candidate SNPs can be also discovered from pigmentation-related or race-related (see below) genes (“data mining”) using, for example, the NCBI SNP database, the Human Genome Unique Gene database (Unigene; NCBI). Sequence files for the genes can be downloaded from proprietary and public databases and input into a SNP/HAPLOTYPE automated pipeline discovery software system such as (SNiPDOCsM system; DNAPrint genomics, Inc.; Sarasota Fla.). This system finds candidate SNPs among the sequences, and documents haplotypes for the sequences with respect to these SNPs. The software uses a variety of quality control metrics when selecting candidate SNPs including the use of user specified stringency variables, the use of PHRED quality control scores and others (See U.S. patent application Ser. No. 09/964,059, filed Sep. 26, 2001).

[0338] As illustrated in the Examples herein, and as described in more detail therein, the invention provides methods for discovering penetrant haplotype alleles. For example, the method can use an iterative, empirical approach to test haplotype alleles of all possible SNP combination within a gene, for the ability to statistically resolve individuals of various trait values. Alternatively, preferred haplotype alleles discovered in a population can be analyzed.

[0339] In another aspect, the invention provides a method for identifying a pigmentation-related or a race-related single nucleotide polymorphism (SNP). The method includes:
[0340] i) identifying a candidate SNP of a pigmentation-related gene or a race-related gene;
[0341] ii) determining that the SNP has a genotype class comprising alleles exhibiting a coherent inheritance pattern, and a minor allele frequency that is greater than 0.01 in at least one race, thereby identifying a validated SNP;
[0342] iii) determining that the validated SNP exhibits significantly different genotype distributions and allele frequencies between individuals of different pigmentation phenotypes or racial classes, thereby identifying a pigmentation-related or race-related SNP.

[0343] The invention also relates to kits, which can be used, for example, to perform a method of the invention. Thus, in one embodiment, the invention provides a kit for identifying haplotype alleles of pigmentation-related SNPs. Such a kit can contain, for example, an oligonucleotide probe, primer, or primer pair, or combinations thereof, of the invention, such oligonucleotides being useful, for example, to identify a SNP or haplotype allele as disclosed herein; or can contain one or more polynucleotides corresponding to a portion of a pigmentation, xenobiotic, or other relevant gene containing one or more nucleotide occurrences associated with a genetic pigmentation trait, with race, or with a combination thereof, such polynucleotide being useful, for example, as a standard (control) that can be examined in parallel with a test sample. In addition, a kit of the invention can contain, for example, reagents for performing a method of the invention, including, for example, one or more detectable labels, which can be used to label a probe or primer or can be incorporated into a product generated using the probe or primer (e.g., an amplification product); one or more polymerases, which can be useful for a method that includes a primer extension or amplification procedure, or other enzyme or enzymes (e.g., a ligase or an endonuclease), which can be useful for performing an oligonucleotide ligation assay or a mismatch cleavage assay; and/or one or more buffers or other reagents that are necessary to or can facilitate performing a method of the invention.

[0344] In one embodiment, a kit of the invention includes one or more primer pairs of the invention, such a kit being useful for performing an amplification reaction such as a polymerase chain reaction (PCR). Such a kit also can contain, for example, one or reagents for amplifying a polynucleotide using a primer pair of the kit. The primer pair(s) can be selected, for example, such that they can be used to determine the nucleotide occurrence of a pigmentation-related SNP, wherein a forward primer of a primer pair selectively hybridizes to a sequence of the target polynucleotide upstream of the SNP position on one strand, and the reverse primer of the primer pair selectively hybridizes to a sequence of the target polynucleotide upstream of the SNP position on a complementary strand. When used together in an amplification reaction an amplification product is formed that includes the SNP loci.

[0345] In addition to primer pairs, in this embodiment the kit can further include a probe that selectively hybridizes to the amplification product of one of the nucleotide occurrences of a SNP, but not the other nucleotide occurrence. Also in this embodiment, the kit can include a third primer which can be used for a primer extension reaction across the SNP loci using the amplification product as a template. In this embodiment the third primer preferably binds to the SNP loci such that the nucleotide at the 3′ terminus of the primer is complementary to one of the nucleotide occurrences at the SNP loci. The primer can then be used in a primer extension reaction to synthesize a polynucleotide using the amplification product as a template, preferably only where the nucleotide occurrence is complementary to the 3′ nucleotide of the primer. The kit can further include the components of the primer extention reaction.

[0346] In another embodiment, a kit of the invention provides a plurality of oligonucleotides of the invention, including one or more oligonucleotide probes or one or more primers, including forward and/or reverse primers, or a combination of such probes and primers or primer pairs. Such a kit provides a convenient source for selecting probe(s) and/or primer(s) useful for identifying one or more SNPs or haplotype alleles as desired. Such a kit also can contain probes and/or primers that conveniently allow a method of the invention to be performed in a multiplex format.

[0347] The kit can also include instructions for using the probes or primers to identify a pigmentation-related haplotype allele.

[0348] The power of the inference drawn according to the methods of the invention is increased by using a complex classifier function. Accordingly, preferred examples of the methods of the invention draw an inference regarding a pigmentation trait or race of a subject using a classification function. A classification function applies nucleotide occurrence information identified for a SNP or set of SNPs such as one or preferably a combination of haplotype alleles, to a set of rules to draw an inference regarding a pigmentation trait or a subject's race. The Examples included herein provide numerous strategies for developing and implementing a classifier function.

[0349] Example 7 shows that a classification scheme may be identified by performing statistical analysis on various combinations of SNPs and haplotypes until maximum accuracy is achieved. In order to use these SNPs or haplotypes to develop a genetic solution that explains the maximum amount of variation of a pigmentation trait in the population, haplotypes incorporating each of these positions in individuals of a known pigmentation trait can be scored, and the results can be combined in various combinations in order to obtain the optimum solution for resolving individuals for that pigmentation trait, for example individuals with dark versus light hair color. Example 7 illustrates a composite, nested solution for classifying an unknown individual as belonging to the dark versus light hair colored groups.

[0350] In certain examples, genotype/biographical data matrices for two groups of pigmentation traits, for example, dark versus light eye color, can be used for a pattern detection algorithm such as the SNiPDOCSsM algorithm (DNAPrint genomics, Inc., Sarasota, Fla.). The purpose of pattern detections algorithms is to fit quantitative (or Mendelian) genetic data with continuous trait distributions (or discrete trait distributions, as the case may be).

[0351] One specific approach that can be used, as illustrated in Example 9, is a Bayesian method, using the frequencies of, for example eye color classes, as the prior probabilities and the frequency of a haplotype based genotype in the eye color class as the class conditional density functions. The posterior probability that a subject belongs to a given class of eye color shade is simply the product of the posterior probabilities derived for each of the four genes, and the eye color class with the highest probability is selected. The power of the inference drawn by this method can be increased by assigning weights to the posterior probabilities for each haplotype system, based on the amount of variance each explains on its own.

[0352] Furthermore, a nested statistical scheme can be developed, as illustrated in Example 9, by which to construct classification rules using complex, compound genotypes. A Bayesian classifier can also be used for this task. However, a routine can be chosen that resembles a genetic algorithm. Within the scheme, a compound genotype contains elements (haplotype pairs genotypes) from multiple genes. The scheme builds a classification tree in a step-wise manner. The roots of the tree are genotypes of a randomly selected haplotype system. Nodes are randomly selected genotype classes, within which there are numerous different constituent genotypes. Compound genotype classes contain more than one compound genotype, the constituents of which are derived from a discrete combination of haplotype systems. In these classification function strategies resembling a genetic classifier, edges connect roots and nodes to comprise compound genotype classes. The tree can be built by first selecting a set of roots and growing the edges to nodes based on the genetic distinction between individuals of light (blue, green) and dark (black, brown) eye color shade within the new compound genotype class defined by the connection (hazel is always assigned to the eye color shade with the most members). Within a compound genotype class, a pair-wise F statistic and associated p-value is used to measure the genetic structure differences between individuals of the various shade of eye colors, though an exact test p-value has also been used with similar results. Individuals of ambiguous haplotype class (less than 75% certainty) are discarded and classified as “not classifiable”. All possible nodes not yet incorporated in the path from the root are tested during each new branching step. The branch that results in the most distinctive partition (i.e., the lowest p-value) among the classes of eye color shade is selected.

[0353] If there is no genetic structure within the new compound genotype class, another node (haplotype) is selected for possible branching, unless there are no more haplotype systems to consider or unless the sample size for the compound genotype is below a certain pre-selected threshold (in which case a “no-decision” is specified). If the lowest p-value for the new compound genotype class is significant, rules are made from its constituent compound genotypes exhibiting significant chi-square residuals. In this case, genotypes within the compound genotype class which are not explainable (for whom chi-square residuals are not significant) are segregated from the rest of the compound genotypes within the class to form new nested node(s), from which further branching is accomplished. Nested nodes always represent new compound genotype classes at first. If branching from this nested node does not result in the ability to create classification rules, the algorithm returns to the compound genotype class from which the nested node was derived and recreates N nested nodes of N constituent compound genotypes. In either case, nested nodes are only created from nodes with statistically significant population structure differences among the shade of eye color classes. In effect, this algorithm allows for the maximum amount of genetic variance contributed by the various combinations of haplotype systems to be learned within specific genetic backgrounds. Once the tree has been completed, the rules produced from it are used to predict the race or pigmentation trait, for example eye shade, of each individual. If the prediction rate is good (e.g., 95% or greater) the process ends, and if it is not, the process is begun again starting with a new haplotype system for the root.

[0354] The classification function can also be performed using other classification methods, such as those disclosed in “Classification and Regression Trees” by Leo Brieman Charles J. Stone Richard A. Olshen Jerome H. Friedman, (Wadsworth International Group, Belmont, Calif., 1984)or those provided in the following computer programs (Available from StatSoft (STATISTICA brand)) for classification analysis: QUEST (Loh & Shih, 1997) and C&RT (Breiman et. al., 1984) programs as well as FACT (Loh & Vanichestakul, 1988) and THAID (Morgan & Messenger, 1973).

[0355] Classification trees can be applied to individual haplotypes, or to improve the accuracy of the inference drawn using the classification trees, can be applied to combinations of haplotypes.

[0356] Example 6 discusses a general method for qualifying a genetic association between a haplotype and a phenotype using a cladogram or a parsimony tree. In the parsimony tree, lines separate haplotypes that are one mutational step from another and biallelic positions within a gene are represented in binary form (1 and 0): Haplotypes residing at similar regions of a cladogram or tree tend to share common phenotypic attributes. This assumption is reasonable since haplotypes situated in proximity to one another share more sequence in common than randomly selected haplotypes, and it is the sequence of a gene that largely determines its function. As such, haplotype analysis using the cladogram provides a useful means for representing genetic data in such a way as to facilitate multivariate analyses for the determination of the biological relevance of the haplotype, as discussed in further detail in Example 6.

[0357] By way of a preferred example typically performed using computer software, the classification function can be developed using linear, quadratic, or correspondence analysis or classification tree multivariate modeling to develop a classifier function incorporating one or more SNPs or sets of SNPs that blindly generalizes to other individuals having a known pigmentation trait. For an example of a combined correspondence analysis and linear/quadratic analysis for constructing complex genetic classifiers see U.S. Pat. No. 60/377,164, filed May 2, 2002. In a preferred example, correspondence analysis is used to encode genotypes for creating the vectors. This overcomes a problem associated with dimensionality, and then the vector components are weighted using a heuristic algorithm to optimize the classifier.

[0358] In one embodiment, the invention includes a method for identifying a classifier function for inferring a pigmentation-trait of a subject. The method includes: i) identifying one or more candidate SNPs of one or more pigmentation genes that have a alleles exhibiting a coherent inheritance pattern (i.e., they are in Hardy-Wienberg equilibrium), and a minor allele frequency that is greater than 0.01 in at least one race, thereby identifying one or more validated SNPs; ii) determining that the one or more validated SNPs exhibits significantly different genotype distributions and allele frequencies between individuals of different pigmentation phenotypes or racial classes, and iii) Using linear, quadratic, correspondence analysis or classification tree multivariate modeling to develop an abstract classifier function incorporating one or more validated SNPs or combinations of validated SNPs that blindly generalizes to other individuals of known pigmentation, thereby identifying a pigmentation-related classification strategy.

[0359] In another embodiment, the invention includes a method for identifying a classifier function for inferring the race of a subject. The method includes: i) identifying one or more candidate SNPs of one or more race-related genes that have a genotype class comprising alleles exhibiting a coherent inheritance pattern, and a minor allele frequency that is greater than 0.01 in at least one race, thereby identifying one or more validated SNPs; ii) determining that the one or more validated SNPs exhibits significantly different genotype distributions and allele frequencies between individuals of different pigmentation phenotypes or racial classes, and iii) Using linear, quadratic, correspondence analysis or classification tree multivariate modeling to develop an abstract classifier function incorporating one or more validated SNPs or combinations of validated SNPs that blindly generalizes to other individuals of known race, thereby identifying a classifier function for .inferring the race of a subject.

[0360] In another embodiment, the invention provides a method for classifying a sample. The method includes: a) computing a genetic variance/covariance matrix for all possible trait class pairs; b) creating a combination of class mean vectors, wherein vector components are binary encodings, correspondence analysis principal coordinates, correspondence analysis factor scores or correspondence analysis standard coordinates; c) representing a sample as an n-dimensional sample vector; and d) classifying a sample by identifying a class mean vector from the combination of class mean vectors, that is the shortest distance from the sample. Such a method is illustrated in Example 14.

[0361] Example 17 illustrates the use of a classification function that uses a parametric, multivariate Quadratic classification technique with modifications for genomics data. Under the assumption that samples are taken from multivariate normal distributions with different mean vectors, with a common variance covariance matrix, a classification procedures introduced previously by Fisher, R. A. (Annals of Eugenics 1936. 7:179-188), Rao (1947, 1948a, 1948b) and Smith (Smith, C. A. B., et al., Annals of Eugenics 1948; 13:272-282), can be applied.

[0362] Under the assumption of normality, the sample mean vector and the sample covariance matrix constitute minimally sufficient statistics, in the sense that any inference based of them carries with it all the information available in the sample. Thus, any classification rule based on these summary statistics ought to be optimal from the point of view of sample information used for their analysis. However, with complex systems, the data often provide additional information not reflected by these statistics, and this additional information can often be used for improving the results based on these statistics. With genetics, sequences may contribute towards phenotype variation through dominance or additivity, wherein their associations with trait values from independent analyses are of varying degrees of strength, but statistically significant. Alternatively, sequences may contribute through epistasis, wherein their association with trait values from independent analyses is weak or non-existent.

[0363] To produce a quadratic classifier sensitive for the epistatic contributions, we devised a weighting scheme for producing unequal variance-covariance matrices for each of the iris color groups used in quadratic analysis. First the most strongly associated genotypes were identified. Next, genotypes of weaker association were randomly selected. Normally when constructing the covariance matrix, M for each factor was calculated using the Z-scores and binary values; a value of 0 within the individual vector if the genotype was absent in an individual, and a 1 if present. Using the weighting scheme, instead of using a binary x when calculating M for each factor, 1+x was used for randomly selected weakly/non-associated sequences, where x is the number of strongly associated genotypes also present in that individual.

[0364] By successively selecting random combinations of weakly/non-associated pigmentation gene features for weighting and testing how well the model derived from these combinations generalizes to the test sample for iris color classification, an optimal weighting strategy can be obtained. Recoding in this manner generally increases the variability of the scores of weakly/non-associated sequences and hence it improves the discriminating power of the model. Although the coding procedure may seem arbitrary, it is important from a practical point of view. For example, there are instances in the areas of statistical forecasting of time series or economics, wherein a data supported methods are recommended, as long as they lead to relatively more accurate inferences. In this case, once the optimal model has been identified, the weighting used for its generation can provide clues on the non-linear relationships between genotypes of different genes towards complex trait variation (i.e., epistasis).

[0365] To test the accuracy of a classification function a Monte Carlo simulation study can be used. A computer program can be written to use a random number generator to select a significant number of individuals on the basis of observed allele frequencies from two pigmentation-trait groups to calculate a multivariate linear classification probability matrix. This experiment can be repeated many times (e.g., 10000 times) to get the summary statistics of Classification and misclassification rates and their Confidence Intervals.

[0366] Example 16, further discusses the recording method used in Example 17 for improving a classification analysis, especially those involving a sample mean vector and sample covariance matrix. This method utilizes additional information that is not reflected by these statistics.

[0367] This procedure recodes weaker genotypes whenever they appear along with ‘best’ genotypes in an individual sample unit.

[0368] Specifically the procedure can include the following:
[0369] Step 1. Identify a small number of ‘best’ genotypes for cross-coding the weak genotypes.
   [0370] This can be done by selecting a subset of the ‘best’ genotype in each gene according to their range of variation in their relative frequencies. Various combinations can be attempted to arrive at an optimal selection. The study reported in Example 16 revealed an optimal choice of the three genotypes g (1,1) (OCA2A), g (3,1) (OCA2C) and g(4,1) (OCA2D). (Note: the first number in parenthesis denotes the haplotype and the second number the allele of that haplotype. G(1,1) would means genotype 1 for feature combination 1. For example ATTA/ATTA may be genotype 1, ATTA/ATTG, genotype 2 etc for the OCA2-A SNP combination which is combination number 1.
[0371] Step 2: Recode second best genotypes:
   [0372] Assign Code 0 if the genotype is absent
   [0373] Code 1+n, where n is the number of selected ‘best’ genotypes that occur together in an individual.

[0374] Such recoding generally increases the variability of scores across the colors (while carrying out the usual discriminant analysis), and hence one can expect a marginal improvement over the results obtained before incorporating such a recoding procedure in them.

[0375] The following examples are intended to illustrate but not limit the invention.

### EXAMPLE 1

### Identification of TYRP1 and OCA Polymorphisms Associated with Pigmentation in Humans

[0376] A multi-step approach was designed to identify genes and gene variants in the population that are statistically associated with hair, eye and skin color. The approach was performed generally as follows:
[0377] 1) Select genes from the human genome database that are likely to be involved in the synthesis, degradation and deposition of melanin, the chemical that causes pigmentation.
[0378] 2) Identify the common genetic variations in the selected genes by designing primers to flank each promoter, exon and 3′ UTR for each of the genes; amplifying and sequencing the DNA corresponding to each of these regions in approximately 500 multi-ethnic donors; and utilizing an algorithm to compare the sequences to one another in order to identify the positions within each region of each gene that are variable in the population. This process results in a gene map for each of the relevant genes.
[0379] 3) Use the gene maps to design and execute large-scale genotyping experiments, whereby several hundred individuals, of known hair, eye and skin color (and ethnicity) are scored for the polymorphisms.
[0380] 4) Use the results obtained in step 3) to identify polymorphisms, and sets of polymorphisms, that are quantitatively and statistically associated with pigmentation.

[0381] No relationship to human pigmentation for any of the originally reported 3 SNPs for the TYRP1 gene and 5 SNPs for the OCA gene has previously been reported. Accordingly, the polymorphisms were scored in hundreds of individuals of known hair, eye and skin color, and statistical analysis was performed on the results (see below). As disclosed herein, an SNP in the TYRP1 gene (TYRP1_{—}3), which appears to be statistically associated with eye color, and an SNP in the OCA gene (OCA2_{—}5), which appears to be statistically associated with eye color and hair color, were identified.

A. Methods:

[0382] Polymorphisms were scored using a single-nucleotide sequencing protocol and equipment purchased and licensed from Orchid Biosciences (Orchid SNPstream 25K instrument, (Orchid BioSciences, Inc., Princeton, N.J.)). Briefly, primers were designed to flank the polymorphism (see Tables 1 to 4), whereby one primer of each pair contained 5′ polythiophosphonate groups. Amplification products were physically attached to a solid substrate via the polythiophosphonate groups and washed using TNT buffer. Washed amplification products were subject to exonuclease III in order to produce single stranded, polythiophosphonate strands. A primer was attached via hybridization to the single stranded molecule, such that the primer could be extended by a single labeled nucleotide.

[0383] The primers used for the OCA2_{—}5 genotyping were:

| | |
|---|---|
| CAATCACAGCCAGTGCTGC; | (SEQ ID NO: 97) |
| and | |
| GCGGTAATTTCCTGTGCTTCT. | (SEQ ID NO: 98) |

[0384] The primers used for the TYRP1_{—}3 genotyping were

| | |
|---|---|
| AAAGGGTCTTCCCAGGTTTG; | (SEQ ID NO: 99) |
| and | |
| GTGGTCTAACAAATGCCCTACTCTC. | (SEQ ID NO: 100) |

[0385] For the TYRP1 polymorphism, if the incorporated nucleotide was a G, a monoclonal antibody was bound in the first step and read via secondary antibody hybridization and conjugate catalyzed reaction in a calorimeter. If the incorporated nucleotide was a T, the antibody did not bind and no color was read. In the second round of hybridization, an antibody that recognizes the modified “T” was used. If the amplification product for an individual contained a “T” at the position, the antibody bound, and was read via secondary binding and conjugate activity in the colorimeter. Individuals of the “GG” genotype showed a dark blue color in the first reaction, which did not change during the second reaction. Individuals of the “GT” genotype showed a light blue color in the first reaction, which became dark blue during the second reaction. Individuals of the “TT” genotype showed no color in the first reaction, and a dark blue color in the second reaction. For the OCA genotypes the letters read were GG, GA and AA, in the same manner.

B. Results:

[0386] The SNPs for TYRP1_{—}3 (marker 217485) and OCA2_{—}5 (marker 217455) are shown in Table 1 which provides information regarding a marker number for each SNP, the name of the gene in which the SNP is found on the chromosome, a public sequence database accession number for a sequence that includes at least one allele of the SNP (where appropriate), the variant IUB code for the SNP, as well as additional information such as the type of polymorphism (coding or non-coding).

[0387] The results, which were obtained from the same runs over a course of 2 days, demonstrate that some of the markers showed no relationship between genotype and pigmentation, whether it be eye, hair or skin (see below; see also, Table 1-1). These results (Table 1-1) provide an additional negative control to include with the “no template”, “template, but no detection materials”, and “water” controls run with each plate in each assay.

[0388] Results in Table 1-1 are segregated based on pigmentation, as well as on the ethnicity of the donor. If a SNP allele is a genetic determinant, or is linked to a genetic determinant of pigmentation, then it should be enriched in African Americans as compared to Caucasians because the average African American generally tends to have darker average skin, eye and hair color than the average Caucasian. However, the reverse is not true; i.e., if an SNP allele is enriched in African Americans compared to Caucasians, it is not necessarily involved in pigmentation, because a) most alleles in almost all human genes show ethnic frequencies differences, which are sometimes quite large, and most of these human genes have nothing to do with pigmentation; and b) any SNP allele that is involved in human pigmentation must show the relationship within any one ethnic group as well as between ethnic groups; i.e., the validity of an SNP allele as a marker for pigmentation (or any trait) must be based on association between individuals of any one ethnic group as well as individuals between ethnic groups, and using race differences to qualify a SNP allele only addresses the latter.

[0389] The results in this Example indicate that the TYRP1_{—}3 SNP and OCA2_{—}5 can have predictive value for human eye color, and that the G allele may be part of a multi-SNP haplotype that is deterministic of, or related to, haplotypes that are deterministic to darker eye color. In addition, the OCA2_{—}5 SNP can have a predictive value for human hair color, and the G allele again can be part of a multi-SNP haplotype that is deterministic of, or related to haplotypes that are deterministic for dark hair color.

Eye Color

[0390] No quantitative no qualitative relationship was detected between the zygosity or specific genotype of the TYR_{—}2 SNP (marker 217467) in Caucasians and eye color. The frequency of the G allele was lower in Caucasians than in African Americans or Asians, though the sample size for Asians was low

[0391] With respect to the TYRP1_{—}3 SNP (marker 217485), whereas the ratio of GG, GT and GA genotypes for Caucasians having light eye color was 1:4:4, the ratio for Caucasians having dark eye color is 1:1:1. Further, the ratio of these genotypes in African Americans was 7:2:1, whereas it was 1:2.5:3 in Caucasians, supporting the assertion that the G allele is associated with dark eye color in human beings (since African Americans tend to have darker eye color on average than Caucasians). Furthermore, the ratio in persons of light brown eye color (brown) was lower than the ratio of persons with medium (brown2) or dark (brown3) eye color, thus indicating a potential quantitative relationship among persons of brown eye color. The results for light versus dark eye color were statistically significant. (p=0.01). These results indicate that genotype, alone, is useful for explaining some percent of variation in the population of eye color (greater than zero), although it does not explain 100% of the variation. As such, the G allele can be part of a multi-SNP haplotype that is deterministic or related to haplotypes that are deterministic to eye color.

[0392] Regarding the OCA2_{—}5 genotype, whereas the ratio of GG:GA:AA genotypes in Caucasians of light (blue, hazel or green) eye color was approximately 0:1:2, the ratio in Caucasians of dark eye color was approximately 0:1:1. Comparing ethnic groups, the ratio of GG:GA:AA genotypes in Caucasians is 0:1:2 and in African Americans, the ratio was approximately 2:1:0, supporting the assertion that the frequency of the G allele is higher in persons of dark eye color than in persons of lighter eye color (again following from the fact that the average African American has darker eye color than the average Caucasian). These results suggest that genotype, alone, cannot explain 100% of the variation in the population of eye color, but that they explain some percent of variation greater than zero, and that the G allele may be part of a multi-SNP haplotype that is deterministic or related to haplotypes that are deterministic to eye color.

[0393] Regarding OCA2_{—}6 genotype, no quantitative nor qualitative relationship existed between the zygosity or specific genotype and eye color within the Caucasian ethnic group. The ratio of the GG:GA:AA genotypes was about the same in Caucasians as in African Americans or Asians (though the sample size for Asians is low), supporting the assertion that this SNP is not deterministic for, nor related to haplotypes that are deterministic for human eye color.

Hair Color

[0394] With respect to the TYR_{—}2 genotype, no quantitative or qualitative relationship existed between the zygosity or specific genotype in Caucasians and hair color. The ratio of the GG:GA:AA genotypes in persons of light hair color was 1:1:0, the same as the ratio in persons of dark hair color. Nevertheless, the frequency of the G allele was lower in Caucasians than in African Americans or Asians (though the sample size for Asians is low).

[0395] With respect to the TYRP1_{—}3 genotype, whereas the ratio of GG:GT:TT genotypes in Caucasian persons of light (blond, auburn) hair color was approximately 1:1:1, the ratio in Caucasian persons of dark hair color (brown or black) was approximately 1:3:2. However, the ratio of these genotypes in the three ethnic groups does not support the assertion that the G allele is associated with lighter hair color; the frequency of the G allele was lower in Caucasians than African Americans, which contradicts the postulate that the frequency of the G allele is higher in persons of light hair color than in persons of dark hair color.

[0396] With respect to the OCA2_{—}5 genotype, whereas the ratio of GG:GA:AA genotypes was 0:0:1 in Caucasian persons of lighter hair color, the ratio in Caucasian persons of darker hair color was 0:1:1, indicating that the frequency of the G allele is higher in Caucasian persons of lighter hair color. Comparing ethnic groups, the ratio of GG:GA:AA genotypes in Caucasians was 0:1:2, and was approximately 2:1:0 in African Americans, supporting the assertion that the frequency of the G allele is higher in persons of dark hair color than in persons of lighter hair color (which follows from the fact that the average African American has darker hair color than the average Caucasian). These results suggest that genotype, alone, cannot explain 100% of the variation in the population of hair color, but that they explain some percent of variation greater than zero; the G allele may be part of a multi-SNP haplotype that is deterministic to, or related to haplotypes that are deterministic for dark hair color.

[0397] With respect to the OCA2_{—}6 genotype, no quantitative or qualitative relationship existed between the zygosity or specific genotype and hair color within the Caucasian ethnic group. The ratio of the GG:GA:AA genotypes was about the same in Caucasians as in African Americans or Asians (though the sample size for Asians is low), supporting the assertion that this SNP is not deterministic for, nor related to haplotypes that are deterministic for human eye color.

Skin Pigmentation

[0398] With respect to the TYR_{—}2 genotype, the ratio of the GG:GA:AA genotypes in persons of light skin color was 1:1:0, the same as the ratio in Caucasian persons of medium skin color, though the ratio is higher in Caucasian persons of dark skin color (2:0:0). However, the sample size for Caucasian persons of dark skin color was too low to draw a conclusion from this result. Nevertheless, the frequency of the G allele was lower in Caucasians than in African Americans or Asians (though the sample size for Asians is low), suggesting that this allele can be involved in human skin color, though confirmation of this result must await further results with a larger sample size of Caucasian persons of dark skin color.

[0399] With respect to the TYRP1_{—}3 genotype, No statistically significant difference in GG:GT:TT ratios was detected, given the sample size.

[0400] With respect to OCA2_{—}5 no statistically significant difference in GG:GA:AA ratios was detected, given the sample size.

[0401] With respect to OCA2_{—}5, no statistically significant difference in GG:GA:AA ratios was detected, given the sample size.

TABLE 1-1

| TYR_2 | | GG | GA | AA | | GG | GA | AA |
|---|---|---|---|---|---|---|---|---|
| EYE (Caucasians) | BLUE | 8 | 9 | 0 | CAUC | 69 | 45 | 0 |
| | GREEN | 5 | 5 | 0 | AFRICAM | 59 | 7 | 0 |
| | HAZEL | 7 | 6 | 0 | ASIAN | 4 | 0 | 0 |
| | BROWN1 | 2 | 1 | 0 | | | | |
| | BROWN2 | 2 | 5 | 0 | | | | |
| | BROWN3 | 1 | 1 | 0 | | | | |
| | NONBRN | 20 | 20 | 0 | | | | |
| | BRN | 5 | 7 | 0 | | | | |
| HAIR(Caucasians) | BLOND | 4 | 4 | 0 | | | | |
| | AUBURN | 1 | 1 | 0 | | | | |
| | BROWN | 13 | 17 | 0 | | | | |
| | BLACK | 1 | 2 | 0 | | | | |
| | LT | 5 | 5 | 0 | | | | |
| | DRK | 14 | 19 | 0 | | | | |
| SKIN(Caucasians) | FAIR | 6 | 10 | 0 | | | | |
| | MED | 10 | 14 | 0 | | | | |
| | DRK | 2 | 0 | 0 | | | | |
| TYRP1_3 | | GG | TT | GT | | GG | GT | TT |
| EYE(Caucasians) | BLUE | 3 | 10 | 9 | CAUC | 25 | 63 | 72 |
| | GREEN | 2 | 4 | 5 | AFRICAM | 71 | 19 | 8 |
| | HAZEL | 1 | 9 | 9 | ASIAN | 28 | 0 | 0 |
| | BROWN1 | 0 | 3 | 0 | | | | |
| | BROWN2 | 4 | 2 | 5 | | | | |
| | BROWN3 | 1 | 2 | 0 | | | | |
| | NONBRN | 6 | 23 | 23 | | | | |
| | BRN | 5 | 4 | 5 | | | | |
| HAIR(Caucasians) | BLOND | 3 | 3 | 2 | | | | |
| | AUBURN | 0 | 1 | 1 | | | | |
| | BROWN | 7 | 16 | 12 | | | | |
| | BLACK | 0 | 2 | 1 | | | | |
| | LT | 3 | 4 | 3 | | | | |
| | DRK | 7 | 18 | 13 | | | | |
| SKIN(Caucasians) | FAIR | 3 | 9 | 7 | | | | |
| | MED | 6 | 12 | 9 | | | | |
| | DRK | 1 | 0 | 1 | | | | |
| OCA2_5 | | GG | GA | AA | | GG | GA | AA |
| EYE(Caucasians) | BLUE | 0 | 9 | 16 | CAUC | 9 | 58 | 106 |
| | GREEN | 0 | 2 | 8 | AFRICAM | 61 | 26 | 8 |
| | HAZEL | 1 | 7 | 15 | ASIAN | 14 | 47 | 58 |
| | BROWN1 | 0 | 3 | 3 | | | | |
| | BROWN2 | 0 | 2 | 2 | | | | |
| | BROWN3 | 0 | 3 | 6 | | | | |
| | NONBRN | 1 | 18 | 39 | | | | |
| | BRN | 0 | 10 | 12 | | | | |
| HAIR(Caucasians) | BLOND | 0 | 1 | 9 | | | | |
| | AUBURN | 0 | 0 | 3 | | | | |
| | BROWN | 0 | 17 | 19 | | | | |
| | BLACK | 0 | 2 | 1 | | | | |
| | LT | 0 | 1 | 12 | | | | |
| | DRK | 0 | 19 | 20 | | | | |
| SKIN(Caucasians) | FAIR | 0 | 6 | 15 | | | | |
| | MED | 0 | 11 | 17 | | | | |
| | DRK | 0 | 1 | 0 | | | | |
| OCA2_6 | | GG | GA | AA | | GG | GA | AA |
| EYE(Caucasians) | BLUE | 22 | 3 | 0 | CAUC | 151 | 26 | 0 |
| | GREEN | 11 | 0 | 0 | AFRICAM | 92 | 3 | 0 |
| | HAZEL | 22 | 4 | 0 | ASIAN | 103 | 17 | 0 |
| | BROWN1 | 3 | 1 | 0 | | | | |
| | BROWN2 | 8 | 1 | 0 | | | | |
| | BROWN3 | 3 | 0 | 0 | | | | |
| | NONBRN | 55 | 7 | 0 | | | | |
| | BRN | 20 | 4 | 0 | | | | |
| HAIR(Caucasians) | BLOND | 11 | 0 | 0 | | | | |
| | AUBURN | 3 | 0 | 0 | | | | |
| | BROWN | 32 | 5 | 0 | | | | |
| | BLACK | 2 | 1 | 0 | | | | |
| | LT | 14 | 0 | 0 | | | | |
| | DRK | 34 | 6 | 0 | | | | |
| SKIN(Caucasians) | FAIR | 20 | 2 | 0 | | | | |
| | MED | 25 | 3 | 0 | | | | |
| | DRK | 2 | 0 | 0 | | | | |

Brown is light brown eye color;
Brown 2 is medium brown; and
Brown 3 is dark brown.
All phenotype data(color) is self-reported by blood donor subjects on a questionnaire filled out at the time of blood donation.

### EXAMPLE 2

### OCA2 8 Polymorphism

[0402] This example describes an additional OCA polymorphism, thus confirming and extending the results disclosed in Example 1. Methods for detecting the nucleotide occurrence at a SNP position are described in Example 1.

[0403] Further analysis of the OCA2 gene also identified another marker, OCA2_{—}8, which is associated with the degree to which human eyes and hair are pigmented. The OCA2_{—}8 polymorphism is a Y (T or C) change and is present at position 86326 within the GenBank Accession No. 13651545 genomic sequence file (see Table 1 for information regarding OCA2_{—}8 as well as all of the SNP markers disclosed herein).

[0404] With respect to OCA2_{—}8, the counts for Caucasian persons of various eye, hair and skin color are shown in Table 2-1. The number of CC and CT genotypes, relative to TT genotypes, was greater in persons of darker eye and hair color than in persons of darker hair color, demonstrating that the frequency of the C allele was greater in persons of darker hair and eye color than in persons of lighter hair and eye color. Since these results were from Caucasians, if the C allele at this locus is associated with eye pigmentation, it was expected to be enriched in racial groups that tend to show darker pigmentation than Caucasians. The data for the ethnic groups showed that, indeed, the frequency of the C allele was significantly higher in African American and Asian persons than in Caucasians (Table 2-1). These results seemed to confirm that the C allele at this locus is predictive for human eye and hair color. Although the results for skin color were inconclusive due to the low sample size, there appeared to be a similar, though less impressive, trend. In addition to the OCA2_{—}8 locus, two other markers in the OCA2 gene showed a similar trend, OCA2_{—}5, which, as disclosed in Example 1, showed strong predictive value for eye/hair pigmentation, and OCA2_{—}6, which showed a weaker predictive value.

[0405] Haplotype analysis was performed involving three potentially valuable markers in the OCA2 gene—OCA2_{—}5, OCA2_{—}6, and OCA2-8. The haplotypes of the subjects were documented with respect to the three markers (e.g., ATG/CTA or GTT/AGA; see Table 2-2), where the sequence on the top of the line represents the combination of polymorphic alleles on the maternal chromosome and the other, the paternal (or vice versa). Haplotypes are strings of polymorphic alleles, much like a string of contiguous sequence bases, except they are not adjacent to one another on a chromosome. In fact, OCA2_{—}5 and OCA2_{—}8 are about 60,000 base pairs apart from one another. It is beneficial to express polymorphisms in terms of multi-locus haplotypes because far fewer haplotypes exist in the world population than would be predicted based on the expectations from random allele combinations. For example, for the three disclosed polymorphic loci within this gene, (G/A), (T/C) and (G/A), there would be 23=8 possible haplotype combinations observed in the population—ATG, ACG, GCG, GTG, ACA, GCA, ATA and GTA. These can be considered possible or potential “flavors” of the OCA2 gene in the population. However, only four haplotypes or “flavors” have been observed in the real data from peoples of the world. For larger numbers of polymorphic loci the disparity between the number of observed and expected haplotypes is larger. This well known phenomenon is caused by systematic genetic forces such as population bottlenecks, random genetic drift, selection, and the like, which have been at work in the population for millions of years, and have created a great deal of genetic “pattern” in the present population. As a result, working in terms of haplotypes offers a geneticist greater statistical power to detect associations, and other genetic phenomena, than working in terms of disjointed genotypes.

[0406] OCA2_{—}5-OCA2_{—}6-OCA2_{—}8 haplotype counts for patients, counted with respect to hair color are shown in Table 2-2. Similar results were obtained when counted with respect to eye color. Though OCA2_{—}6 only showed weak association, it was included in this analysis because its value as part of the haplotype is greater than its value on its own. (The same is true for the other two markers).

[0407] From this data, it is clear that the ATG haplotype was the most frequent haplotype, and was disproportionately present in persons of lighter hair color. Haplotypes other than ATG (such as ACG, GCG and GCA) tended to occur in the DNA of persons of darker hair color. Another way to look at this data is to look at haplotype pairs, or compound genotypes (see Table 2-3). This view of the data, which is the most biologically relevant view, shows that persons of lighter hair color (blond and red) are almost always ATG/ATG, whereas persons of darker hair color are more likely to be of another combination including ATG and some other haplotype (see, also, Table 2-3).

[0408] These results demonstrate that persons of light hair color (red or blond) are almost always ATG/ATG genotypes (12 out of 15 cases). In contrast, persons of dark hair color usually harbor an ATG haplotype in combination with some other haplotype (26 out of 40 cases). A specimen of one ATG haplotype in combination with some other haplotype (ATG/OTHER), is almost always a person of darker hair color. A person of two ATG haplotypes (ATG/ATG) could be either a person of light hair color or a person of dark hair color, but is more likely to be a person of light hair color.

[0409] These results also demonstrate that the OCA2_{—}5-OCA2_{—}6-OCA2_{—}8 multilocus genotype of a person provides a predictive value for their hair (and eye) color. The certainty of assignment of an unknown human specimen to the dark or light hair color class, using their compound genotype (haplotype pair) for these three loci can be calculated using well known statistical methods.

TABLE 2-1

| OCA2_8 | | TT | CT | CC | Ethnic Group | TT | CT | CC |
|---|---|---|---|---|---|---|---|---|
| EYE | BLUE | 14 | 9 | 2 | CAUC | 39 | 42 | 14 |
| | GREEN | 7 | 3 | 0 | AFRICAM | 11 | 31 | 56 |
| | HAZEL | 11 | 9 | 3 | ASIAN | 1 | 7 | 11 |
| | BROWN | 7 | 11 | 7 | | | | |
| | B/G | 21 | 12 | 2 | | | | |
| | (LIGHTER) | | | | | | | |
| | H/BR | 18 | 20 | 4 | | | | |
| | (DARKER) | | | | | | | |
| HAIR | BLOND | 8 | 3 | 0 | | | | |
| | RED/ | 4 | 0 | 0 | | | | |
| | AUBURN | | | | | | | |
| | BROWN | 12 | 15 | 3 | | | | |
| | BLACK | 1 | 2 | 0 | | | | |
| | BL/RD | 12 | 3 | 0 | | | | |
| | (LIGHT) | | | | | | | |
| | BR/BL | 13 | 17 | 3 | | | | |
| | (DARK) | | | | | | | |
| SKIN | FAIR | 13 | 8 | 1 | | | | |
| | MED | 10 | 11 | 2 | | | | |
| | DRK | 0 | 1 | 0 | | | | |

[0410] TABLE 2-2

| | | OCA2_5 | OCA2_8 | OCA2_6 | HAPLOTYPES | | | |
|---|---|---|---|---|---|---|---|---|
| HAIR | ATG | ACG | GCG | GTG | ACA | GCA | ATA | GTA |
| BLOND | 19 | 2 | 1 | 0 | 0 | 0 | 0 | 0 |
| RED | 8 | 0 | 0 | 0 | 0 | 0 | 0 | 0 |
| BROWN | 39 | 8 | 12 | 0 | 0 | 4 | 0 | 0 |
| BLACK | 4 | 0 | 1 | 0 | 0 | 1 | 0 | 0 |
| LIGHT (BL + RD) | 27 | 2 | 1 | 0 | 0 | 0 | 0 | 0 |
| DARK (BRN + BLK) | 43 | 8 | 13 | 0 | 0 | 5 | 0 | 0 |

[0411] TABLE 2-3

| | | | | | | |
|---|---|---|---|---|---|---|
| ATG/ | ATG/ | ATG/ | ACG/ | GCA/ | GCA/ | ACG/ |
| ATG | GCG | ACG | ACG | ATG | ACG | ATG |

| | | | | | | | |
|---|---|---|---|---|---|---|---|
| BLOND | 8 | 1 | 0 | 0 | 0 | 0 | 2 |
| RED | 4 | 0 | 0 | 0 | 0 | 0 | 0 |
| BROWN | 13 | 11 | 4 | 1 | 3 | 1 | 4 |
| BLACK | 1 | 1 | 0 | 0 | 1 | 0 | 0 |
| LIGHT | 12 | 1 | 0 | 0 | 0 | 0 | 2 |
| DARK | 14 | 12 | 4 | 1 | 4 | 1 | 4 |

[0412] TABLE 2-4

| | Two copies of ATG | One copy of ATG | No copies of ATG |
|---|---|---|---|
| | ATG/ATG | ATG/OTHER | OTHER/OTHER |
| LIGHT | 12 | 3 | 0 |
| DARK | 14 | 20 | 6 |

### EXAMPLE 3

### Identification of Tyrosinase (TYR) Gene Polymorphism Associated with Pigmentation

[0413] This example demonstrates that a SNP in a third gene, encoding tyrosinase, is associated with pigmentation in humans. Methods for detecting the nucleotide occurrence at a SNP position are described in Example 1.

[0414] A SNP, designated TYR_{—}3, that was associated with pigmentation was identified in the tyrosinase gene. The TYR_{—}3 SNP is shown in Table 1. The gene, the polymorphism name, its location, and the reference sequence identifier (NCBI:Genbank) are indicated in Table 1. In addition, the variant IUB code, its source of discovery, and the type of polymorphisms (a serine to a tyrosine amino acid change in the coding amino acid sequence of the expression product, are also shown; “Poly” indicates that it was verified as a polymorphic position).

[0415] TYR_{—}3 is one of the SNPs disclosed herein as being associated with the degree to which human tissues are pigmented. Of a very large number of different genes, the TYR gene is the third gene found to harbor SNPs so associated. Each of the three genes, OCA2, TYRP1 and, now, TYR, was discovered based on the observation that loss-of-function mutants in mice and humans exhibited a condition called oculocutaneous albinism. Individuals afflicted with this disease lack any pigment in their skin, hair or eyes, and are victims of numerous physiological and social challenges. Oculocutaneous mutants are quite rare in the human population and, until now, it was not known whether or how natural polymorphic variants in these genes were related to the normal variation in human skin, eye and hair color exhibited by the various peoples of the world.

[0416] The TYR_{—}3 SNP, which is the first SNP found in the tyrosinase gene to be associated with human pigmentation, is a C to an A change (IUB symbol=M) at nucleotide position 657 in the NCBI reference sequence accession number NM000372. The TYR_{—}3 polymorphism also is present in the publicly available NCBI SNP database (dbSNP), but it was not previously associated with the degree to which human tissues are pigmented.

[0417] TYR_{—}3 is a unique polymorphism that meets the requirements for a SNP associated with pigmentation as disclosed herein. The data showing the association, as well as an interpretation of the data, are presented in Table 3-1 and Table 3-2. The presented results are statistically significant for hair color.

Hair Color

[0418] The ratio of CC:CA:AA genotypes in persons of dark hair (black or brown) was 24:14:3, and in persons of light colored hair was 1:5:3. These ratios are sufficiently different from one another to conclude that the frequency of the A allele at the TYR_{—}3 locus was significantly higher in persons of light colored hair. For example, the frequency of the C allele in persons with dark hair color was (24+(0.5)(14))/41=0.75, whereas the frequency of the C allele in persons of lighter hair color was (1+(0.5)(5))/9=0.39; the values, 0.75 and 0.39, are quite distinct.

Eye Color

[0419] Although the results are provocative for eye color, they are not conclusive. The ratio of CC:CA:AA genotypes in persons of dark eye color was 27:12:5, and the ratio in persons of light hair color was 12:20:4, which is significantly distinct. Nonetheless, the number of AA genotypes in the two classes of individuals was not significantly different (5 for dark, 4 for light). If the C allele was associated with darker eye color, as is indicated by the number of relative homozygous CC to heterozygous CA genotypes between these two groups, the number of AA homozygotes of lighter eye color would exceed that of darker eye color. However, this was not the case, and as a result, the results are less impressive (though not negative) for eye color.

Skin Color

[0420] In comparing persons of fair and medium skin tone, there were no obvious differences in the ratio of CC:CA:AA genotypes. The frequency of the C allele in persons of dark skin tone may have been greater than in persons of light or medium skin tone, however the sample size was not adequate to draw a conclusion.

Ethnic Differences

[0421] If the C allele is associated with darker hair color, and functionally related to the degree to which humans in the world are pigmented, as indicated by the data, the C allele should be enriched in persons of average darker hair, eye and skin color. African Americans are one such group. The ratio of CC:CA:AA genotypes in randomly selected African Americans was 84:13:1, and the ratio in randomly selected Caucasians (a distinct population from that for which eye, hair and skin pigmentation results are presented above) was 37:49:13 (Table 3-2). Indeed, the frequency of the C allele at this polymorphic locus was enriched in persons of darker average eye, hair and skin color (African Americans), extending the results observed within the Caucasian group, and supporting the assertion that the C allele was associated with darker hair color in human beings. No polymorphism has been found to be apparently associated with darker eye, hair, or skin color that was not also enriched in ethnic groups of average darker eye, hair or skin color.

TABLE 3-1

| | DNAPRINT | | |
|---|---|---|---|
| | SNP NUMBER 217468 | | |
| TYR_3 | CC | CA | AA |
| EYE (Caucasians) | | | |
| BROWN | 10 | 8 | 3 |
| HAZEL | 17 | 4 | 2 |
| GREEN | 9 | 8 | 1 |
| BLUE | 10 | 12 | 3 |
| HAIR (Caucasians) | | | |
| BLACK | 3 | 0 | 0 |
| BROWN | 21 | 14 | 0 |
| RED/AUBURN | 0 | 3 | 0 |
| BLOND | 1 | 5 | 3 |
| SKIN (Caucasians) | | | |
| FAIR | 9 | 9 | 2 |
| MEDIUM | 12 | 12 | 4 |
| DARK | 2 | 0 | 0 |

[0422] TABLE 3-2

| | CC | CA | AA |
|---|---|---|---|
| Caucasian | 37 | 49 | 13 |
| African American | 84 | 13 | 1 |

### EXAMPLE 4

### Identification of Polymorphisms Associated with Pigmentation

[0423] The study sample consisted of several hundred patients exhibiting variable eye, skin and skin pigmentation levels (colors). Subjects provided a blood sample after providing informed consent and completing a biographical questionnaire. Samples were processed immediately into DNA, which will be stored at −80 degrees for the duration of the study. Samples were used only as per the study design and project protocol. Biographical data was entered into an Oracle relational database system run on a Sun Enterprise 420R server.

[0424] Gene markers were selected based on evidence from the body of literature, and from other sources of information, that implicate them in either the synthesis, degradation and/or the deposition of the human chromatophore melanin. The Physicians Desk Reference, Online Mendelian Inheritance database (NCBI) and PubMed/Medline are two examples for sources of this type of information.

[0425] Candidate SNPs were discovered from marker genes (“data mining”) using, for example, the NCBI SNP database or the Human Genome Unique Gene database (Unigene; NCBI). Sequence files for the genes were downloaded from proprietary and public databases and saved as a text file in FASTA format and analyzed using a multiple sequence alignment tool. The text file that was obtained from this analysis served as the input for a SNP/HAPLOTYPE automated pipeline discovery software system. This system finds candidate SNPs among the sequences, and documents haplotypes for the sequences with respect to these SNPs. The software uses a variety of quality control metrics when selecting candidate SNPs including the use of user specified stringency variables, the use of PHRED quality control scores and others (See U.S. patent application Ser. No. 09/964,059, filed Sep. 26, 2001).

[0426] Assays using SNP-specific kits were performed using an Orchid SNPstream 25K instrument for high throughput genotyping (Orchid BioSciences, Inc., Princeton, N.J.). This instrument, which is based on Beckman-Coulter robotics and operates as a completely automated platform, carrying out the entire process from DNA specimen to called allele, can read 25,000 genotypes in a day. An automated ABI310 and an ABI3700 capillary electrophoresis genetic analyzer are used for SNP discovery. Amplification reactions are set up using a Beckman Automated liquid handling system, and amplified in an MJ research Thermal Cyclers or using a PE Applied Biosystems 9700 thermal cycler. Data analysis is performed using a SUN Enterprise 460 Unix server, which includes 6 PC terminals networked with the server.

[0427] The public genome database was constructed from donors for which eye, skin and hair color information is absent. Further, it was constructed from only 5 donors. In order to discover new SNPs that may be under-represented or biased against in the public human SNP and Unigene databases, a larger pool (n=500) of DNA specimens obtained from the Cornell Institute were seeded with certain of the specimens collected using the disclosed methods. Specimens from this combined pool were used as a template for amplification using a combination of Pfu turbo thermostable DNA polymerase and Taq polymerase. Amplification was performed in the presence of 1.5 mM MgCl₂, 5 mM KCl, 1 mM Tris, pH 9.0, and 0.1% Triton X-100 nonionic detergent. Amplification products were cloned into a T-vector using the Clontech (Palo Alto Calif.) PCR Cloning Kit, transformed into Calcium Chloride Competent cells (Stratagene; La Jolla Calif.), plated on LB-ampicillin plates, and grown overnight.

[0428] Clones were selected from each plate, isolated by mini-prep using the Promega Wizard or Qiagen Plasmid Purification Kit, and sequenced using standard PE Applied Biosystems Big Dye Terminator Sequencing Chemistry. Sequences were trimmed of vector sequence and quality trimmed, and deposited into an Internet based relational database system.

[0429] Genotypes were surveyed within the specimen cohorts by sequencing using Klenow fragment-based single base primer extension and an automated Orchid Biosciences SNPstream instrument (Orchid BioSciences, Inc., Princeton, N.J.). Orchid technology is based on dye-linked immunochemical recognition of base incorporated during extension. Reactions are processed in 384 well format and stored into a temporary database application until transferred to the UNIX based SQL database.

[0430] The data produced corresponds to SNPs that are informative for distinguishing common genetic haplotypes identified from public and private databases. Using algorithms to infer haplotypes as described in the detail description section (See U.S. patent application Ser. No. 09/964,059, filed Sep. 26, 2001) the data was be used to infer haplotypes from genotype data corresponding to these SNPs. In addition to this, raw genotypes were considered empirically, without respect to predefined haplotypes.

[0431] Allele frequencies were calculated and pair-wise haplotype frequencies estimated using an EM algorithm (Excoffier and Slatkin 1995). Linkage disequilibrium coefficients was then calculated. The analytical approach was always based on the case-control study design. Genotype/biographical data matrices for both groups, for example, dark versus light eye color, were used for a pattern detection algorithm such as the SNiPDOCSSNI algorithm (See U.S. patent application Ser. No. 09/964,059, filed Sep. 26, 2001). The purpose of these algorithms is to fit quantitative (or Mendelian) genetic data with continuous trait distributions (or discrete, as the case may be). In addition to various parameters such as linkage disequilibrium coefficients, allele and haplotype frequencies (within ethnic, control and case groups), chi-square statistics and other population genetic parameters such as Panmitic indices were calculated to control for ethnic, ancestral or other systematic variation between the case and control groups. Markers/haplotypes with value for distinguishing the case matrix from the control, if any, were presented in mathematical form describing any relationship and accompanied by association (test and effect) statistics.

### EXAMPLE 5

### Single Nucleotide Polymorphisms Predictive of Retina Pigmentation and Hair Pigmentation

[0432] This example identifies SNPs with predictive value for the degree of iris or hair pigmentation, or both, in humans. The following results were obtained for the disclosed SNPs from Caucasians of various eye and hair colors. All phenotype data (color) is self-reported by blood donor subjects on a questionnaire filled out at the time of blood donation.

[0433] In Table 5-1, below, “DARK” for eyes means brown and hazel; “LIGHT” for eyes means blue and green. “DARK” for hair means black and brown; “LIGHT” for hair means blond and red/auburn. Methods for detecting the nucleotide occurrence at a SNP position are described in Example 4.

[0434] The results shown below are segregated based on pigmentation of each group of individuals. In the following results, eye color is synonymous with the degree to which the retina is pigmented. The same is true for skin pigmentation and hair color. Numerous studies have shown that the variation in human skin, eye and hair color is caused by variation in the degree to which melanin is deposited in the appropriate tissues during development, which in turn is a function of the degree to which melanin is synthesized and degraded. Until now, it has not been known which, or whether, polymorphic variation in the melanin synthesis genes determines natural variation in human eye and hair color.

### Results for Each SNP Surveyed in these Experiments

Eye Color:

[0435] OCA2DBSNP 52401: The association of this marker with eye color can be seen by comparing the brown versus non-brown groups. Whereas the brown group shows an AA:GA:GG genotype ratio of 14:14:1, the non-brown group shows a 53:25:2 ratio. Thus, the ratio of the brown group reduces to a 1:1:0 ratio, that of the non-brown group reduces to an approximate 2:1:0 ratio and the AA genotype is twice as common in persons of an eye color other than brown. The results comparing dark versus light eye color for this marker do not appear to be as strong. This may be because the AA genotype is carried more frequently in persons of hazel versus brown eye color, and looking at the ratios for the specific eye colors supports this idea. Thus the frequency of the A allele is greater in persons of lighter or non-brown eye color.

[0436] OCAIDBSNP 165011: The association of this marker with eye color can be seen by comparing the dark (brown plus hazel) versus light (green plus blue) groups. The ratio of AA:GA:GG genotypes for the dark eye group is 34:17:1, but is higher in the light eye group—42:10:0. This reduces to an approximate ratio of 2:1:0 for dark and 4:1:0 for light. The ratio of brown versus non brown are similar—20:9:0 for brown versus 56:18:1 for non brown. This reduces to 2:1:0 for brown and 3:1:0 for non-brown. Thus, the frequency of the A allele is higher in persons of lighter or non-brown eye color.

[0437] OCA2DBSNP 146405: The association of this marker with eye color can be seen by comparing the dark (brown plus hazel) versus light (green plus blue) groups. The ratio of AA:GA:GG genotypes for the dark eye group is 24:16:9 but only 16:29:6 for the light eye group. This reduces to an approximate ratio of 3:2:1 for dark and 2:3:1 for light. The ratio of brown versus non brown are less compelling. In total, the frequency of the A adele is higher in persons of darker or brownish eye color, and may be especially predictive of the HAZEL group.

[0438] OCA2DBSNP 8321: The association of this marker with eye color can be seen by comparing the dark (brown plus hazel) versus light (green plus blue) groups. The ratio of GG:G:TT genotypes for the dark eye group is 32:20:2 but 44:11:0 for the light eye group. This reduces to an approximate ratio of 1.5:1:0 for dark and 4:0:0 which is significantly different. The ratio of brown versus non brown are less compelling. In total, the frequency of the G allele is higher in persons of lighter or bluish/green eye color.

Pigment:

[0439] None of the markers appeared to be predictive for the darkness of Caucasian skin color.

Hair Color:

[0440] OCA2DBSNP 52401: The association of the G allele with lighter hair color can be seen by comparing the ratios of blond persons versus persons of non-blond colored hair. The ratio of persons of blond hair is 8:6:0 versus a ratio of 42:23:2 for persons of non-blond hair. This reduces to an approximate ratio of 1:1:0 for blonds and 2:1:0 for non-blonds. Thus the frequency of the G allele is greater by two-fold in persons of blond hair versus persons of non-blond hair color.

[0441] OCA2DBSNP 165011: The association of the A allele with darker hair color can be seen by comparing the ratios of blond persons versus persons of non-blond colored hair. The ratio, of persons of blond hair is 8:4:0 versus a ratio of 55:9:1 for persons of non-blond hair. This reduces to an approximate ratio of 2:1:0 for blonds and 5:1:0 for non-blonds. The results for persons of dark versus light hair color are similar in ratios.

[0442] Thus the frequency of the A allele is greater by 2.5-fold in persons of blond hair versus persons of non-blond hair color.

[0443] OCA2DBSNP 146405: The association of the G allele with lighter hair color can be seen by comparing the ratios of blond persons versus persons of non-blond colored hair as well as the ratio of persons of dark versus light hair color. The ratio of persons of blond hair is 0:6:6 versus a ratio of 29:28:8 for persons of non-blond hair. This reduces to an approximate ratio of 0:6:6 for blonds and 4:4:1 for non-blonds. The results for persons of dark versus light hair color are similar in ratios. Dark hair persons show a 26:26:8 ratio but persons of lighter hair color show a ratio of 3:8:6 reducing to 4:4:1 and 1:2:2 respectively. These ratios are dramatically different. Thus the frequency of the G allele is greater in persons of blond or light hair versus persons of non-blond or dark hair color.

[0444] OCA2DBSNP 8321: The sample size for the comparison of persons of lighter colored hair versus persons of darker colored hair is not adequate in this particular experiment.

[0445] These results demonstrate that each of the SNPs described above has predictive value for the degree of retina or hair pigmentation, or both, in humans.

TABLE 5-1

| OCA2DBSNP_52401 | | AA | GA | GG |
|---|---|---|---|---|
| EYE (Caucasians) | BLUE | 26 | 12 | 2 |
| | GREEN | 11 | 5 | 0 |
| | HAZEL | 16 | 8 | 1 |
| | BROWN | 14 | 14 | 1 |
| | DARK | 30 | 22 | 2 |
| | LIGHT | 37 | 17 | 2 |
| | BROWN | 14 | 14 | 1 |
| | NON-BROWN | 53 | 25 | 2 |
| HAIR (Caucasians) | BLOND | 8 | 6 | 0 |
| | RED/AUBURN | 3 | 3 | 0 |
| | BROWN | 37 | 19 | 2 |
| | BLACK | 2 | 1 | 0 |
| | LT | 11 | 9 | 0 |
| | DRK | 39 | 20 | 2 |
| | BLOND | 8 | 6 | 0 |
| | NON BLOND | 42 | 23 | 2 |
| SKIN (Caucasians) | FAIR | 23 | 11 | 1 |
| | MED | 24 | 18 | 0 |
| | DRK | 1 | 0 | 0 |
| OCA2DBSNP_165011 | | AA | GA | GG |
| EYE(Caucasians) | BLUE | 29 | 9 | 0 |
| | GREEN | 13 | 1 | 0 |
| | HAZEL | 14 | 8 | 1 |
| | BROWN | 20 | 9 | 0 |
| | NONBRN | 56 | 18 | 1 |
| | BRN | 20 | 9 | 0 |
| | DARK | 34 | 17 | 1 |
| | LIGHT | 42 | 10 | 0 |
| HAIR (Caucasians) | BLOND | 8 | 4 | 0 |
| | RED/AUBURN | 5 | 1 | 0 |
| | BROWN | 47 | 8 | 1 |
| | BLACK | 3 | 0 | 0 |
| HAIR (Caucasians) | BLOND | 8 | 4 | 0 |
| | RED/AUBURN | 5 | 1 | 0 |
| | BROWN | 47 | 8 | 1 |
| | BLACK | 3 | 0 | 0 |
| | LT | 3 | 4 | 3 |
| | DRK | 7 | 18 | 13 |
| | NON BLOND | 55 | 9 | 1 |
| | BLOND | 8 | 4 | 0 |
| SKIN (Caucasians) | FAIR | 24 | 8 | 1 |
| | MED | 37 | 5 | 0 |
| | DRK | 1 | 0 | 0 |
| OCA2DBSNP_146405 | | AA | GA | GG |
| EYE (Caucasians) | BLUE | 13 | 20 | 2 |
| | GREEN | 3 | 9 | 4 |
| | HAZEL | 13 | 5 | 4 |
| | BROWN1 | 11 | 11 | 5 |
| | NONBRN | 11 | 11 | 5 |
| | BRN | 29 | 34 | 6 |
| | DARK | 24 | 16 | 9 |
| | LIGHT | 16 | 29 | 6 |
| | BROWN | 11 | 11 | 5 |
| | NON BROWN | 29 | 34 | 6 |
| HAIR (Caucasians) | BLOND | 0 | 6 | 6 |
| | RED/AUBURN | 3 | 2 | 0 |
| | BROWN | 25 | 25 | 7 |
| | BLACK | 1 | 1 | 1 |
| | LT | 3 | 8 | 6 |
| | DRK | 26 | 19 | 20 |
| | NON BLOND | 29 | 28 | 8 |
| | BLOND | 0 | 6 | 6 |
| SKIN (Caucasians) | FAIR | 12 | 14 | 6 |
| | MED | 15 | 19 | 0 |
| | DRK | 0 | 1 | 0 |
| OCA2DBSNP_8321 | | GG | GT | TT |
| EYE (Caucasians) | BLUE | 31 | 9 | 0 |
| | GREEN | 13 | 3 | 0 |
| | HAZEL | 15 | 10 | 0 |
| | BROWN | 17 | 10 | 2 |
| | NONBRN | 59 | 22 | 0 |
| | BRN | 17 | 10 | 2 |
| | LIGHT | 44 | 11 | 0 |
| | DARK | 32 | 20 | 2 |
| HAIR (Caucasians) | BLOND | 8 | 6 | 0 |
| | RED/AUBURN | 5 | 1 | 0 |
| | BROWN | 40 | 17 | 1 |
| | BLACK | 3 | 0 | 0 |
| | LT | 13 | 7 | 0 |
| | DRK | 43 | 17 | 1 |
| | NON BLOND | 48 | 18 | 1 |
| | BLOND | 8 | 6 | |
| SKIN (Caucasians) | FAIR | 23 | 12 | 0 |
| | MED | 29 | 13 | 1 |
| | DRK | 1 | 0 | 0 |

### EXAMPLE 6

### Method for Relating OCA2 Gene Variants to Human Eye and Hair Color: SNP Analysis in the Context of the Haplotype

[0446] The results in this Example provides a general method for qualifying a genetic association between a haplotype and a phenotype. Methods for detecting the nucleotide occurrence at a SNP position are described in Example 4.

[0447] The results described below demonstrate that the OCA2 SNPs disclosed herein are intimately involved in the degree to which human eye and hair is pigmented. The method relies on the generally known principle that haplotypes observed in the human population can be expressed in a cladogram or a parsimony tree such that the evolutionary relationships between the haplotypes are discernable. In such a cladogram, haplotypes derived from common haplotype ancestors will be present in similar regions of the tree. Furthermore, haplotypes that are similar in sequence content will be more closely proximated in the tree to one another than to dissimilar haplotypes. One such tree is shown in FIG. 1, where lines separate haplotypes that are one mutational step from another and biallelic positions within a gene are represented in binary form (1 and 0):

[0448] The present method is based on the fact that this type of haplotype tree can be used as the starting point for a novel method of drawing associations between gene variants and physical traits in the human population because haplotypes that are similar to one another in sequence content are more likely to share common, or similar phenotypic values than randomly selected haplotypes. Thus, haplotypes residing at similar regions of a cladogram or tree will tend to share common phenotypic attributes. For example, the biological effect of haplotype 00100001 at the lower right hand side of the cladogram in the above figure is more likely to be similar to that of 00110000 next to it in the cladogram than to 100010000 at the upper left hand side of the cladogram. This assumption is reasonable since haplotypes situated in proximity to one another share more sequence in common than randomly selected haplotypes, and it is the sequence of a gene that largely determines its function. As such, haplotype analysis using the cladogram provides a useful means for representing genetic data in such a way as to facilitate multivariate analyses for the determination of the biological relevance of the haplotype.

[0449] The two main features of the presently disclosed approach are that a simple haplotype encoding scheme can be used to graphically project haplotypes in a manner that is sensitive to their position in the haplotype cladogram, and therefore their inter-relations (see below); and that both haplotypes present in an individual are encoded, and the diploid combinations of haplotypes are actually plotted. When the analysis is performed in this manner for many individuals, and plotted (in the case of a univariate or bivariate analysis), patterns are easily recognized (or not recognized, depending on the experiment).

[0450] Each diploid pair of haplotypes was projected in n-dimensional space, in such a manner as to be true to the relative position of the haplotypes in the cladogram or tree. Thus, vectors for two individuals with “similar” haplotype combinations are closer to one another in the plot than to others that have a dissimilar haplotype combination Oust like in the cladogram). The method can be used to plot n-dimensional vectors for individuals of various haplotype combinations, in n-dimensional feature space. Plots in n-dimensional feature space allow for the recognition of complex genetic pattern that results from dominance effects, additivity or other complex or quantitative genetic phenomena such epistatic effects. This method of genetic data representation offers a new power to detect and quantify the degree to which haplotypes determine various human traits because it allows data traditionally considered in discrete, discontinuously distributed terms, to be considered in a more useful continuous format.

[0451] The method used to encode the haplotypes for plotting was as follows: The haploids are represented as points in a multidimensional haploid space. For example, an 8 locus haplotype can be plotted in an 8 dimensional haploid space of (4⁸) possible locations. A heterozygote pair of haplotypes can be represented by a line joining the two points. In the case of homozygotes, a loop is formed to join the point with itself. To represent the association between haplotype and phenotype, or genotype and phenotype, for characters like eye color or hair color, the line representing the corresponding haplotypes in a pair is colored for visual ease, or assigned a value for computational convenience. This analysis helps reveal the relationship between haplotype and phenotypes. For interpretation, or to visualize a complex multidimensional plot, the dimension of the plot can be reduced by considering a variety of mathematical methods. Doing this, the multidimensional plot can be projected into a two or three dimensional real space (R² or R³), for making relationships visible.

[0452] The value in the method is its ability to express discrete genetics combinations in terms of a continuum of values. Though it is counter-intuitive to considering genetic values such as genotypes or haplotypes in terms of continuous distributions (after all, genes are discrete entities), there is value in doing so. This can be appreciated when one considers that it is often times difficult to produce data that is representative of all the world's population. It is not practical, nor feasible to sequence every person in the world. Genetic data sets are therefore samples of the larger world populations, and parameters derived from these data are estimates of true parameter values. Because it is not practical to generate genetic data sets completely representative of the world's peoples, classifying individuals based on estimates of genetic parameters or features is a common problem with genetic studies. For example, if a study using 1000 individuals produces a “solution” such that all 1000 people can be properly classified based on their genetic constitution, it is difficult to know how to classify an individual containing a haplotype or haplotype combination not observed in this study. The present approach helps to solve this problem.

[0453] By representing genetic data in continuous terms (i.e., in a feature space), continuous partitions in that space can be defined that effectively resolve between discrete haplotype-trait events that have been observed and scored, and have not yet been observed and scored. Thus, a solution developed through application of the present method can be more comprehensive than one developed based on standard multivariate analyses.

[0454] Geometric modeling of OCA2 haplotypes reveals the power of the individual SNP markers as predictive markers for human hair and eye color. The method is exemplified using the OCA2 gene subject as disclosed herein. Eight SNPs, alleles of which, individually, are associated with the degree to which human hair and eyes are pigmented, were used. These SNPs are, in order, OCA2_{—}5, OCA2_{—}6, OCA2_{—}8, OCA2_RS1800414, OCA2DBSNP_{—}52401, OCA2DBSNP_{—}146405, OCA2DBSNP_{—}165011 and OCA2DBSNP_{—}8321.

[0455] Each of these (except OCA2_RS1800414 due to low minor allele frequency) showed an ostensible association with eye or hair color on their own. A haplotype of these 8 markers would be expressed as ATGAAAAG. The first A represents the allele on a person's chromosome at the OCA2_{—}5 locus, the second T the allele at the persons OCA2_{—}6 locus, etc. Each person would have two haplotypes to make a haplotype pair, such as ATGAAAAG/ATGAAAAT. Applying the Stephens and Donnelly algorithm (Am. J. Hum. Genet. 68:978-989, 2001, which is incorporated herein by reference) to the genotype data for Caucasians resulted in the list of haplotypes shown in Table 6-1, below.

[0456] The phase of the 8 SNPs in the OCA2 gene were determined for a group of 47 individuals by computationally inferring haplotypes using an algorithm originally proposed by Stephens and Donnelly (2001). From genotype data, the algorithm used a Bayesian Likelihood estimation scheme to predict that there are 19 OCA2 haplotypes present in the 47 person Caucasian population, and predicted the particular pair of haplotypes for each of these individuals. It is from point that the present approach operates.

[0457] To encode the haplotypes in a manner that is visually appreciated, a simpler approach than that described above was used. Rather than plot the haplotype cladogram in the 8 dimensional space, assign numerical values to the individual haplotypes and plot the haplotype value pairs for each individual in n-dimensional space (where n is the number of genes or haplotype systems), the haplotype cladogram in 2-dimensional space is plotted and assigned Cartesian coordinates to the individual haplotypes for plotting of haplotype pairs in the n-dimensional space.

[0458] Haplotypes were used to construct a cladogram, or an evolutionary tree similar to that shown above. The tree was constructed using a maximum parsimony technique and is not shown because it is essentially represented in Table 6-2. The first step was to use the cladogram to recode the haplotypes into a form that is amenable for plotting in multidimensional space. The method could work as effectively for haplotype-haplotype combinations as for haplotype-genotype combinations.

[0459] The algorithm was as follows for the two dimensional approach used in this study:
[0460] 1) Construct a haplotype cladogram for the haplotype systems of interest.
[0461] 2) For any one haplotype system (i.e., gene), transpose the cladogram onto a two dimensional grid (see the grid in Table 16-2).
[0462] 3) Assign values from −n to n to the grid columns and rows such that {n−(−n)}<2.
[0463] 4) Recode each individual haplotype into its new (x,y) coordinates within this graph. For example, haplotype 2 gets the value (−1,2). Each individual in the haplotype list will now have two pair of coordinates. For example, a person with one copy of haplotype 2 and one copy of haplotype 4 would have the values (−1,2) and (−2,4). This creates a 2×2 matrix for each individual (i.e., {−1,2/−2,4}).
[0464] 5) Repeat the process starting at step 2 for other haplotype systems (genes) or environmental variables (i.e., biographical or medical data) part of the analysis. If only genotype data is available for a marker, the matrix for each person would be a 1×2 matrix rather than 2×2. Non-genetic data can be encoded for by building a 1×N matrix v=(v1, v2 . . . vn) where N is the number of variables, and v represents a numerical value for the data that is derived by considering a scaled range of possible values.
[0465] 6) Calculate a vector p=(p1, . . . , pm) as follows; p1 is the 2×2 or 1×2 matrix of coordinate values for haplotype or genotype one, p2 is the matrix of coordinate values for haplotype or genotype pair two etc; and

[0466] 7) Plot the vectors in m-dimensional space.

TABLE 6-1

List of haplotypes of OCA2
OCA2
List of haplotypes

| | | |
|---|---|---|
| 1: | AGTAAAAT | (5) |
| 2: | AGTAAAGG | (8) |
| 3: | AGTAGGAG | (13) |
| 4: | AGTAAAAG | (43) |
| 5: | GGCAAAGG | (7) |
| 6: | AGTAAGAG | (30) |
| 7: | GGCAAAAG | (17) |
| 8: | GACAAAAG | (9) |
| 9: | AGTAGGAT | (10) |
| 10: | AGTAGAAG | (5) |
| 11. | GGCAGAGT | (2) |
| 12. | AGCAAGAG | (13) |
| 13: | AFTAGGGG | (1) |
| 14: | GGTAGGAG | (2) |
| 15: | AGCAAAAG | (3) |
| 16: | AGCAAAAT | (4) |
| 17: | AGCAGAAG | (3) |
| 18: | AGTAGAAT | (2) |
| 19: | AGTAAGAT | (1) |

[0467] Table 6-1 shows a list of haplotypes for the OCA2 gene obtained by applying the Stephens and Donnelly algorithm to the genotype data set for the markers, in order, to form a haplotype. The grid in FIG. 2 was used to encode individual haplotype pairs. For example, a person with the 2,3 haplotype combination would be represented with the values (−1,4) and (−2,1) in the matrix {(−1,4)/(−2,1)}. Once the haplotype pair of each individual was re-coded as a vector, they were plotted in m-dimensional feature space (FIG. 2).

[0468] In FIG. 3, the haplotype pairs for each individual was plotted by drawing a line between the first pair of coordinates (encoded from the first haplotype for that person) to the second pair of coordinates (encoded from the second haplotype for that person). FIG. 3 shows that the diploid pair of haplotypes in individuals is non-randomly distributed with respect to hair color. The block arrow indicates that one haplotype combination was only seen in persons of brown hair color. Only persons of blond hair color contain haplotype pairs that are represented in the plot as lines extending from the bottom left part of the upper left quadrant to the upper right quadrant. Only persons of brown hair color contain haplotype pairs that are represented in the plot as lines extending from the upper right quadrant to the lower left quadrant. Further, only persons of brown hair color contain haplotype pairs that are represented by lines extending from the lower region of the upper left quadrant to the lower left quadrant, and only blonds contain haplotype pairs represented by lines extending from the lower region of the upper left quadrant to the lower right quadrant or upper right quadrant. This pattern was apparent because 1) OCA2 haplotypes are determinative for variable hair color in the human population; 2) individuals with the same, or related haplotypes tend to exhibit a similar hair color trait; and 3) OCA2 haplotypes are associated with hair color in terms of haplotype combinations. The last point provides a reasonable conclusion in view of commonly known genetics principles (i.e., genetic dominance).

[0469] The curved arrows indicate that another haplotype combination was seen in persons of black, brown and blond hair color, but that the TYR_{—}3 genotype in persons of black hair color is CC, that in persons of brown hair color is CA and that in persons of blond hair color is AA. This is an example of a second dimension (a second variable) helping to resolve the data and facilitating concept formation. This results is reasonable in terms of genetic epistasis, wherein specific combinations of genes have unique impacts on traits.

[0470] From the plot, a series of patterns are discemable, and from these patterns, rules can be constructed that can enable the classification of the posterior probability of correctly classifying a person as belonging to a particular hair color group. If the plot was presented in three dimensions, rather than two, partitions in the space can be drawn to segregate the various hair color groups (which would then be planes), and these partitions can be used as a decision plane against which to make such a classification decision. Additional haplotypes also can be present in the population not represented in this analysis. However, using the present method, routine statistical tests can be used to measure the reliability of the classification of such unknown haplotypes. Assuming that members of a given hair color class contain previously identified haplotypes associated in this analysis with a given class, or related to such haplotypes evolutionarily, then the present method will provide that they would be positioned in the plot in the same neighborhood as others found in persons of that same hair color. As such, they would fall on the same side of the decision plane as the known haplotype combinations for that group, and their classification would be made accurately because of this. This is true even though the specific haplotypes, or haplotype combination, was not observed in our study.

[0471] This data presented herein is a representative sampling of a much larger data set, and only part of the data is shown to keep the figure manageable in terms of complexity. The results of this analysis of 8 locus OCA2 haplotypes and one TYR SNP, allows the following determination:
[0472] 1) Individuals containing the OCA2 haplotype combination AGTAAGAG/AGTAAAAG (haplotypes 6,4 encoded as (−3,1)(−2,3)) are always (6/6) brown haired individuals. These two haplotypes differ by only one position, hence their proximity on the plot.
[0473] 2) Individuals containing the OCA2 haplotype combination AGTAGGAG/AGTAAAAG (6/6) (haplotypes 3,4 encoded as (−2,1)(−2,3)) are dark (brown or black) haired individuals if their TYR 3 genotype is CC or CA, but blond or auburn (light brown) haired individuals if their TYR_{—}3 genotype is AA (allele A was linked with the light hair color phenotype on its own).
[0474] 3) Individuals containing the OCA2 haplotype pair AGTAAAAG/AGTAGGAT (haplotypes (4,9) encoded as (−2,3)(1,3)) are always brown haired individuals (2/2). Any individual with haplotype AGTAGGAT (haplotype 9) and a haplotype other than AGTAAAAG is brown haired individuals (4/4 individuals).
[0475] 4) Individuals containing the OCA2 haplotype pair AGCAAGAG/AGTAGGAT (haplotypes 9,12 encoded as (−3,−1)(1,3)) are always blond haired individuals (2/2).
[0476] 5) Individuals with the haplotype 12 AGCAAGAG 6 (−3,−1) and another haplotype not 9 (1,3) are brown haired individuals (5/5 individuals).
[0477] 6) Individuals with the haplotype AGTAAAGG (haplotype 2 encoded as (−1,4)), and any other haplotype, are always brown haired individuals (3/3 individuals). Evidently haplotype AGTAAAGG is dominant for brown hair.
[0478] 7) Individuals with the haplotype AGTAAGAG/GACAAAAG (haplotype combination (6,8) encoded as (−3,1)(0,−4)) are always brown hair (2/2 individuals).
[0479] 8) Individuals with the haplotype GGCAAAAG (haplotype 7 encoded as (1,−4)) is always brown unless it is accompanied by a haplotype 7 (−3,1) (3/3 individuals). The same is true for haplotype 5 (2,−4)—brown unless paired with (−3,1) (3/3 individuals)

[0480] The value of the geometric modeling scheme can be seen in result 8. The same result was obtained with haplotypes 5 and 7, and these two are juxtaposed in the haplotype cladogram which shows that they are highly related to one another. Though the sample size is low for haplotype 5 or haplotype 7, the sample size for haplotype 5+7 is greater, and the result may show statistical significance. By grouping related haplotypes that show similar average genetic effects, one can overcome the limitations inherent to multivariate analyses (mainly, the larger the number of variables, the smaller your sample size for each class of variable combination).

[0481] The value of plotting in multiple dimensions can be seen from result 2). Without the TYR_{—}3 genotype to resolve the individuals in the haplotype 3,4 combination group, these individuals would be confounders.

[0482] Several other haplotype pairs are present in only one individual used in this experiment. There are some confounders for this study. For example, the haplotype AGTAAAAG/AGTAAAAG(haplotype (4,4), encoded as (−1,3)(−1,3)) appears for persons of brown, red and auburn hair individuals, and the TYR_{—}3 genotype does not help resolve these three groups (not shown in figure). A brown haired person with this pair has the AA genotype and another the CC genotype although the C allele is most frequent in/persons of dark hair. This apparent discrepancy can be explained by assuming that the OCA2 haplotype+TYR_{—}3 genotype does not explain all of the hair color variation in the population; there may be other TYR alleles involved, or other genotypes/haplotypes in other genes that may need to be measured to resolve persons with this haplotype pair. This is an important observation: hair color in humans is not determined by one gene, or by one gene and an allele of a second. It is more complex than a biallelic trait, and there are probably 4-5 genes involved in the coloration of human hair. The results presented in the present two gene analysis identify two of these genes. These may be genes that are analyze later, or they may be genes that have not yet been analyzed.

[0483] Although the present analysis does not explain 100% of the variability in human hair color, and indeed, one would not expect a two gene solution to explain all of the variability in human hair color because there are 4-5 genes involved in melanin synthesis for which mutations have been identified to impact human pigmentation, the results obtained for the OCA2 8 locus haplotype +TYR_{—}3 genotype plot explained all but 5/42 of the individuals, and 22/24 haplotype pair classes. The results indicate that human hair color is largely explainable through consideration of the diploid OCA2 haplotype and TYR-3 genotype combination present in any Caucasian individual.

TABLE 16-2

| | −3 | −2 | −1 | 0 | 1 | 2 | 3 |
|---|---|---|---|---|---|---|---|
| 4 | | | 2 | 18 | | | |
| 3 | | 4 | 1 | 19 | 9 | NOTOBS | |
| 2 | 10 | NOTOBS | | NOTOBS | NOTOBS | | |
| 1 | 6 | 3 | | 14 | 13 | | |
| 0 | | | | | | | |
| −1 | 12 | | | | | | |
| −2 | NOTOBS | 17 | 15 | 16 | | | |
| −3 | | | | | | | |
| −4 | | | | 8 | 7 | 5 | NOTOBS |
| −5 | | | | | | | 11 |

[0484] Table 16-2 provides a grid of OCA2 haplotypes obtained by overlaying the cladogram of haploypes onto a two dimensional grid. The number of the haplotype corresponds to the number of the haplotype sequence shown in Table 16-1 (i.e., haplotype 2 is AGTAAAAT).

### EXAMPLE 7

### Hair Color Haplotype Identification and Model Development

[0485] The single nucleotide polymorphisms (SNPs) disclosed in this example each, on their own, show an association with the degree to which human hair is pigmented, that is they are penetrant SNPs. In addition, these SNPs can be combined in different combinations to explain variable hair color in the human population.

[0486] A “vertical” re-sequencing effort was performed in order to identify the common SNP variants at each of three genes known to be deterministically involved in melanin synthesis; the Tyrosinase (TYR), Tyrosinase like protein (TYRP1) and the Oculocutaneous albinism 2 gene (OCA2). Methods for detecting the nucleotide occurrence at a SNP position are described in Example 4. Of 23 SNP positions surveyed for these three genes, three SNPs were identified at the TYR locus, and four SNPs were identified at the OCA2 locus that contain predictive value for the degree to which human hair is pigmented (see Table 16). All of the SNPs have been disclosed except for the TYRSNP_{—}8 SNP.

[0487] TYRSNP_{—}8 is a polymorphism in the tyrosinase gene that was discovered through several mechanisms. Initially, it was identified using software as disclosed above to compare EST sequences to one another from the NCBI Unigene database. It was subsequently identified again from an in-house re-sequencing effort. The TYRSNP_{—}8 SNP is one of the few TYR SNPs present in the public SNP database (dbSNP, NCBI). The data for the TYRSNP_{—}8 marker are shown in Table 1. On its own, this marker appeared to have little value as a predictive tool for hair coloration in humans (Table 7-1). However, when combined into haplotypes with other TYR markers presented herein, TYRSNP_{—}8 reveals its influence, which is significant.

[0488] Unphased genotypes were scored at seven loci (Table 7-2) for 189 individuals. Of these, 46 individuals were Caucasians, for whom there were no missing data for any of the seven loci and for whom hair color was known. Haplotypes within the TYR and OCA2 genes were inferred using the algorithm of Stephens and Donnelly (2001). A program was developed to store these inferred haplotypes into an Oracle schema containing phenotype information for each individual, and phenotype and genotype date for the individuals were then partitioned into two groups; persons of dark natural hair color (black or brown) and persons of light natural hair color (red, blonde).

[0489] Table 1 and Table 7-2 show the polymorphisms used for constructing composite solution A. The gene within which the SNP resides is shown in column 1. The name of the SNP is shown in column 2, and the marker number (identification number) is shown in column 3. The IUB code for the nucleotide change imposed by the SNP is shown in column 4, and the amino acid change (if any) is shown in column 5. Nucleotides in brackets indicate deletions. All of these markers are disclosed herein and Table 1 provides additional information regarding the markers used in this study.

[0490] In order to test for population level differences in genetic structure between these two groups, pair-wise difference estimations, Slatkin linearized F-statistic estimations and exact tests for non-differentiation assuming the null hypothesis (that no difference between the groups exists) were performed. The results are summarized for three different whole gene haplotype systems in table 7-3.

[0491] Table 7-3 shows the population level structure differences between haplotyped individuals (Column 3) at three genes (Column 1) in two different groups (Column 2). The first group contained individuals with dark hair color (brown and black) and the second contained individuals with light hair color (red and blond). The exact test for non-differentiation (Column 4) performs several thousand randomly generated permutations to randomly generate haplotype constituencies for the two groups, and tests the frequency with which these virtual groups show a greater difference between them than the observed groups. A low number indicates that the data actually observed in the study was not due to chance.

[0492] The corrected pair-wise differences (CORR. PW, Column 5) measures the average number of differences between randomly chosen sites within haplotypes selected from the two groups, corrected against the average number of differences observed within each group. A higher number indicates that the haplotype constituency of the two groups is significantly different. The P-value for this measurement, which is an effect statistic, is shown in Column 6 (PW FST P); a value below 0.05 indicates that the value present in Column 5 is statistically significant. A third measurement of the difference between the colored hair groups is presented in Column 7, the Slatkin F-statistic (SLATKIN); a number higher than 0.05 indicates that the difference between the two groups is statistically significant. The results of these tests show that there is significant difference in the TYR haplotype constituency between the dark and light hair color groups (row 1, Table 7-3). In contrast, little difference in the TYRP1 haplotype constituency exists (row 2, Table 7-3) and borderline difference in the OCA2 haplotype constituency exists (row 3, Table 7-3).

[0493] In order to elaborate on the significant population level difference in TYR haplotype constitution, an automated software application was used to score TYR haplotype pairs within each of the two groups. Four different TYR haplotypes (ACG, ACA, AAG, and AGC) and five different haplotype combinations were observed in this analysis (AGC/ACA, ACG/AAG, ACG/ACG, AAG/AAG, AAG/ACA; Table 18). The results of this analysis showed a clear distinction in the average effect on hair color for the four observed TYR haplotypes. Of the persons found to have at least one ACG haplotype (n=32), 96.8% of these individuals had either brown or black hair. Of the remaining individuals (n=15), roughly half were of dark (black or brown) hair color and half were of red or blond (light) hair color. Of persons with two copies of the ACG TYR haplotype (row 3, Table 7-4), 30% had black hair, whereas 9.5% of persons with only one copy of ACG had black hair.

[0494] Table 7-4 shows the TYR haplotype pair frequencies for individuals of each of the four hair color classes. The haplotype pair is shown in columns 1 and 2, and the frequency of individuals exhibiting a given hair color within this group is shown in columns 3-6. The haplotype associated with darker hair color is shown in bold print (ACG). Frequencies were tabulated from simple counts of individuals for each diploid pair class.

[0495] Though the presence of the ACG TYR haplotype was a good predictive marker for dark hair color, there were a small number (n=8) of confounding dark haired (brown) individuals without the ACG haplotype. In an attempt to explain these confounders, OCA2 haplotypes were compared for the light and dark haired individuals, whom did not have an-AGC TYR haplotype. In addition to lacking an AGC haplotype at the TYR gene, each blond hair individual also haplotyped as a CACG homozygote at the OCA2 locus. Half of the dark haired confounders also had a homozygote pair of CACG haplotypes, but half did not, and grouping the individuals based on the criteria of a homozygous CACG OCA2 haplotype partitioned the data most effectively; no other SNP combinations within the OCA2 gene resolved dark and light haired individuals not containing the AGC TYR haplotype.

[0496] In total, using the TYR AGC haplotype and the homozygous condition of the CACG OCA2 haplotype, the combined results explained 100% of the blond individuals and 90% of the brown hair colored individuals in our study (Table 7-5). The two gene solution also explains 91.3% of the total number of individuals in our study with regard to their natural hair color (Table 7-5). Table 7-5 shows a composite solution for variable human hair color in the Caucasian population. The constraints on gene haplotype sequences for our SNPs are boxed in columns 2 and 3, and the line between the columns indicate the operator “AND”. For example, row one shows that 100% of the individuals with the non-AGC TYR haplotype AND the CACG homozygous haplotype pair were correctly classified as light haired individuals. The percent of individuals explained by these constraints for the two hair color classes is indicated (rows 1 and 3) in column 4. The total number of individuals explained by the composite solution are indicated in the fourth row of column 4.

[0497] The logic of the solution is shown in FIG. 3. The accuracy of predictions for the solution is shown in Table 7-6a and Table 7-6b. The solution is capable of predicting the proper natural hair color (Light=blond or red or Dark=black or brown) in Caucasians with over 90% accuracy. Part of the 10% not correctly classified are Auburn haired individuals who were not scored in this study (since it is not clear which group to assign them to). When the test is performed on a multi-ethnic group of individuals the accuracy improves to 98%. The reason for this improvement is due to dramatic differences in allele frequencies for each of these markers in the various ethnic groups, and for each of the seven SNPs part of this solution, the frequency of the allele associated with darker hair color in Caucasians is dramatically enriched in the ethnic groups which tend to have darker hair color (African Americans). Because of this, the haplotype solution applies better to the general world population than to Caucasians alone; including African Americans and Asians improves the performance of the solution.

[0498] In the experiment discussed in this Example, SNPs within the TYR, TYRP1 and OCA2 genes were identified that are individually associated with the degree to which human hair is pigmented. In order to use these SNPs to develop a genetic solution that explains the maximum amount of hair color variation in the population, haplotypes incorporating each of these positions in individuals of known hair color were scored, and the results were combined in various combinations in order to obtain the optimum solution for resolving individuals with dark versus light hair color. The results revealed a composite, nested solution for classifying an unknown individual as belonging to the dark versus light hair colored groups.

[0499] The solution employs haplotypes at two of these genes (TYR and OCA2). The first step of the solution determines the diploid pair of TYR_{—}3, TYR_{—}5 and TYRSNP_{—}8 haplotypes in an individual. Individuals with one or two copies of the AGC haplotype are classified as belonging to the dark hair color group with 81% accuracy in Caucasians and 98% accuracy when applied to individuals irrespective of race. This step results in two groups—a correctly classified dark hair color group (AGC haplotype containing), and a mixed group of dark and light hair colored individuals (non-AGC haplotype containing). The second step uses the individuals without the TYR-AGC haplotype. The diploid pair of OCA2_{—}2, OCA2_{—}5, OCA2_RS1800405 and OCA2_{—}6 haplotypes were determined for each individual. If an individual had a homozygous CACG haplotype pair, they were classified in the light hair group with 100% accuracy. If not, they were classified in the dark hair group with only 50% accuracy. The final accuracy of the solution was 90% within the Caucasian group and 98% when applied to individuals irrespective of race.

[0500] This solution appears to be the first method capable of using a DNA specimen to classify an unknown individual with regard to natural hair color. If the ethnicity of the individual is known from other tests such as an STR test, then the accuracy of the determination can be precisely determined. For example, if the race of the individual is African American, the dark hair answer from our solution would be correct 98% of the time. If the race of the individual is Caucasian, the dark hair answer would have a likelihood of being correct of 90%, and a light hair answer would have a likelihood of correctness of nearly 100%.

[0501] The results also indicate that there is a dose response effect for the ACG haplotype, as individuals with the ACG/ACG haplotype pair are significantly more likely to have black hair than brown hair. Individuals with only one copy of ACG are more likely to have brown hair than black. Interestingly, the ACG/ACG haplotype pair is the most frequent haplotype found in the African American group, which is mainly comprised of black haired individuals. By noting the number of ACG haplotypes an individual harbors, the posterior probability that the specimen belongs to a black versus a brown haired individual can be calculated. Thus, the solution disclosed herein can resolve hair colored individuals on terms that are more subtle than dark versus light.

TABLE 7-1

| | TYRSNP_8 | | |
|---|---|---|---|
| | GENOTYPE | | |
| | AA | GA | GG |
| EYE | | | |
| BROWN | 0 | 6 | 5 |
| HAZEL | 0 | 5 | 5 |
| GREEN | 0 | 5 | 4 |
| BLUE | 0 | 7 | 8 |
| HAIR | | | |
| BLACK | 0 | 2 | 0 |
| BROWN | 0 | 14 | 12 |
| RED/AUB | 0 | 2 | 2 |
| BLOND | 0 | 3 | 3 |

[0502] TABLE 7-2

| | | | Nucleotide | |
|---|---|---|---|---|
| Gene | SNP name | Marker | Change | AA change |
| TYR | TYR_2 | 217467 | [ATA] | Ile deletion |
| TYR | TYR_3 | 217468 | M | Ser to Tyr |
| TYR | TYRSNP_8 | 217473 | R | Arg to Gln |
| OCA2 | OCA2_2 | 217452 | Y | Arg to Trp |
| OCA2 | OCA2_5 | 217455 | R | Silent |
| OCA2 | OCA2_RS1800405 | 712061 | Y | Intron |
| OCA1 | OCA2_6 | 217456 | R | Arg to Gln |

[0503] TABLE 7-3

| | | | EXACT P | CORR. | | |
|---|---|---|---|---|---|---|
| GENE | GROUPS | N | VALUE | PW | PW FST P | SLATKIN |
| TYR | DARK/LIGHT hair | 48 | 0.00000 +− 0.00000 | 0.27053 | <0.0001 +− 0.0000 | 0.376 |
| TYRP1 | DARK/LIGHT hair | 48 | 0.41130 +− 0.00663 | 0.01013 | 0.4775 +− 0.0237 | 0 |
| OCA2 | DARK/LIGHT hair | 48 | 0.98720 +− 0.00289 | 0.11463 | 0.0360 +− 0.0201 | 0.042 |

[0504] TABLE 7-4

NUMBER OF HAIR COLORED
INDIVIDUALS

| | | | | | |
|---|---|---|---|---|---|
| HAP 1 | HAP 2 | BLACK | BROWN | RED | BLOND |

| | | | | | |
|---|---|---|---|---|---|
| ACG | ACA | 0.14 | 0.86 | 0 | 0 |
| ACG | AAG | 0.53 | 0.41 | 0 | 0.06 |
| ACG | ACG | 0.30 | 0.70 | 0 | 0 |
| AAG | AAG | 0 | 0.40 | 0 | 0.60 |
| AAG | ACA | 0 | 0.60 | 0.10 | 0.30 |

[0505] TABLE 7-5

| | | | CORRECT |
|---|---|---|---|
| HAIR | TYR | OCA2 | CLASSIF. |
| LIGHT | NON | CACG HOMO | 100% |
| | AGC | | |
| DARK | NON | NOT CACG | 50% |
| | AGC | HOMO | |
| DARK | AGC | | 97% |
| ALL | | | 91.3% |

[0506] TABLE 7-6a
Total Caucasians Correctly Classified:

| | Individuals correctly | Total individuals in | Percent accuracy of |
|---|---|---|---|
| Group | classified | group | classification |
| Light | 7 | 7 | 100% |
| Dark | 36 | 41 | 88% |
| Total | 43 | 48 | 90% |

[0507] TABLE 7-6b
Total Caucasians, African Americans and Asians Correctly Classified:

| | Individuals correctly | Total individuals in | Percent accuracy of |
|---|---|---|---|
| Group | classified | group | classification |
| Light | 7 | 7 | 100% |
| Dark | 228 | 233 | 98% |
| Total | 235 | 240 | 98% |

### EXAMPLE 8

### Eye Color Haplotype Identification and Inference Model Development

[0508] Having identified several haplotype systems whose constituents were associated with eye color shade, a nested statistical approach was developed for assembling these component pieces into a complex genetics mosaic for explaining variable human eye color shade. A classification tree solution developed using these systems was 96.3% accurate for genetically predicting the degree to which human retinas are pigmented in Caucasians.

[0509] In this example, which is not the optimal solution, the tyrosinase (TYR), oculocutaneous 2 (OCA2), tyrosinase like protein 1 (TYRP1), melanocortin receptor (MC1R) and adaptin B1 protein (ADP1), adaptin 3 D subunit 1 (AP3D1) loci were selected as candidate genes for the study of variable human eye color because they are known to be involved in pigmentation and from mutant OCA phenotypes it is known that they play a role in retinal pigmentation. Except for the OCA2 gene, relatively few SNPs have been documented in public database resources (NCBI:dbSNP), and those SNPs that are present are not evenly distributed across the coding sequence of the genes. Because comprehensive SNP maps (both in a horizontal sense from 5 to 3 and in a vertical sense from large numbers of individuals) are required in order to thoroughly survey the contribution of common haplotypes towards variable human traits, first a detailed SNP map was built for each of these genes. Methods for detecting the nucleotide occurrence at a SNP position are described in Example 4. Forty, 20, 15, 25 and 10 candidate SNPs were identified in the OCA2, TYRP1, MC1R, TYR and APB3 genes, respectively. Using a group of 133 Caucasian, 133 African American and 40 Asian individuals of unknown pigmentation, about 80% of these SNPs were validated as polymorphisms, 60% of these had a minor allele frequency of 1% or greater in this multi-ethnic group and half of these 60% were bi-allelic in the Caucasian population (data not shown, and accumulated with the assistance of Orchid Biosciences of Princeton, N.J.). These SNPs were passed to phase 2 of the study.

[0510] Next approximately 300 Caucasian individuals were scored for self-reported eye color at each of these SNPs. From this data, the SNPs were prioritized by calculating the allele and genotype frequencies in groups of individuals of different races and varying eye colors and eye color shades. For the latter classification, light eyes were defined as either blue or green and dark eyes as black, brown or hazel. SNPs were passed to the third round of analysis if their bi-allelic genotypes, or one of their alleles, were preferentially represented within an eye color or eye color shade group as determined using chi-square tests. If a SNP passed this test, and the dark allele was preferred in, or monomorphically present in races of average darker eye color than Caucasians (such as African Americans and Asians), it was passed to the third phase of the analysis. In fact, this latter constraint proved to not be necessary, as all of the alleles associated with darker eye colors in Caucasians were over-represented in races with darker average eye color (data not shown). SNPs passing all three tests were passed to the next step of the analysis where they were randomly condensed into various overlapping, and non-overlapping haplotype systems and tested for association to shade of eye color. To maximize the statistical power of our analysis, we focused on 2 and 3 locus haplotype systems.

TYR2LOC920

[0511] Fifteen novel (validated) SNPs within the TYR gene were identified. Five of these SNPs passed the three selection criteria. Using these five SNPs, five haplotype systems were constructed and identified one that appeared to be especially predictive for Caucasian eye color (TYR2LOC920, incorporating 2 SNPs in the seventh exon of the TYR gene). To test whether individual TYR2LOC920 haplotypes are associated with shade of eye color, individual haplotypes were counted in each of two classes of eye color shade (dark=black, brown or hazel; light=blue or green). The null hypothesis that eye colors are not associated with specific TYR2LOC920 haplotypes was tested by performing a Pearson's Chi-square and Fisher's exact test on haplotype counts (Table 8-1).

[0512] The Pearson's chi-square test value was 6.56 (df=3j, p=0.087), and the Fisher's exact test resulted in a p=0.079. Both of these are significant at the p<0. 0 level, but not at the p<0.05 level. Constructing conditional probability statements from the data, where p=prob(light/haplotype), we observed that the probability that a TYR2LOC920 individual with a CA haplotype is light eyed is p=0.39, (95% CI is [0.32, 0.44]), which is almost one half that of an individual with a CG haplotype (p=0.51, 95% CI [0.43, 0.58]). Taken together, the results suggest that there may be a statistical association between individual TYR2LOC920 haplotypes and shade of eye color. Analysis at the level of the genotype (diploid pair of haplotypes) revealed more convincing results. To test the null hypothesis that there is no association between genotypes and eye colors we calculated Chi-square test and effect statistics for each of the haplotype systems. Table 8-2 shows the counts of the observed TYR2LOC920 genotypes. The results suggested a clear relationship between TYR2LOC920 genotypes and eye color; a greater number of individuals with G23 genotype (AG/CA) are light eyed than not, but the reverse is true for individuals with the G11 genotype (CG/CG). Pearson's chi-square test without Yates' continuity correction for counts of the 6 observed genotypes yielded a value of 21.31, with 5 degrees of freedom (p=0.0007). A Fishers exact test statistic was significant at the P=0.0003 level. These results allow a rejection of the null hypothesis in favor of the hypothesis that eye colors (defined as light=blue and green, and dark—hazel, brown and black) are associated with specific TYR2LOC920 genotypes. To more specifically identify and quantify the associations we computed the adjusted residuals (AR, data not shown), which follow an N(0,1) distribution as per large sample theory. The values of AR clearly showed that genotypes G11:CG/CG and G22: AG/AG are significantly and positively associated with dark eye colors (p<0.05) and genotype G23:AG/CA is associated with light eye color (p<0.05)(data not shown).

OCA3LOC109

[0513] Nineteen novel SNPs were identified within the OCA2 gene that met the three selection criteria. Using these SNPs, we constructed and tested 10 haplotype systems and identified five that appeared to be predictive for Caucasian eye color. Two of these haplotype systems (OCA3LOC109, incorporating 3 SNPs (markers 217458, 712054, and 886896) distributed evenly within the region from exon 11 to the 3′ UTR within the OCA2 gene; OCA3LOC920, incorporating 3 SNPs (217452, 217455, and 712061) spread more or less evenly within the 9^{th} and 10^{th} exons of the OCA2 gene) gave especially strong results.

[0514] To test the null hypothesis that there is no association between OCA3LOC109 haplotypes and shade of eye color, we performed chi-square and adjusted residual tests on the OCA3LOC109 haplotype counts for individuals of the various eye color shades (Table 8-3).

[0515] This analysis indicated that specific OCA3LOC109 haplotypes were associated with shade of eye color (chi-square=29.47, d.f.=6, p<0.0001). Adjusted residuals were calculated for the haplotypes and haplotype H1:ATA was found to be significantly associated with light eye color (p<0.05). In contrast, haplotypes H4:GCA, H5:GCG, H6:GTA and H7:GTG were found to be significantly associated with dark eye color (p<0.05 for each haplotype). We next extended the analysis to OCA3LOC109 genotypes (diploid pairs of haplotypes) (Table 8-4). We tested the null hypothesis that there is no association between OCA3LOC109 genotypes and eye color shade. The result of this analysis revealed that certain OCA3LOC109 genotypes were associated with shade of eye color (chi-square value=42.5478, d.f.=17, p=0.0006). These results allowed a rejection of the null hypothesis in favor of the hypothesis that eye colors (defined as light=blue and green, and dark—hazel, brown and black) are associated with specific OCA3LOC109 genotypes. To more specifically identify and quantify the associations, we computed the AR for the genotype counts (data not shown). This analysis revealed that genotype G12:ATA/ATG is statistically associated with light eye color (p<0.05 level), and that genotypes G25:ATG/GCG and G27:ATG/GTG are found to be associated with dark eye color (p<0.05 for each).

[0516] Due to the unusual strength of these associations, a site-by- site analysis of allelic contribution towards variance of eye color was conducted. To test the null hypothesis that mutation at the first locus of the system contributed any variation in eye color, chi-square tests were conducted on sub-cladogram groups of OCA3LOC109 haplotypes that isolated the variation at locus one within three locus haplotype system. Testing the significance of difference between individual haplotypes within this context revealed chi-square values that were highly significant; comparison of eye colors for individuals of the H2:CGC versus the H3:TGC genotypes gave a Chi-square value=8.0115, d.f.=1, P=0.0046 and Fisher's exact test P-value=0.0049. Similar results obtained when mutations at site 2 and site 3 of this haplotype system were tested (Chi-square value=4.3544, d.f.=1, P=0.0369/Fisher's exact test P-value=0.0571 and Chi-square value=4.4399, d.f.=1, P=0.035/Fisher's exact test P-value=0.0363, respectively). The conclusion from these combined results was that mutations at each of the three sites within the OCA3LOC109 haplotype system contribute to variation in eye color shade. A nested contingency analysis between haplotypes and eye colors confirmed these findings. In this case, we have seven haplotypes: 0-step clades are represented by: H1:ATA, H2:ATG, H3: ACG, H4:GCA, H5:GCG, H6:GTA, H7:GTG. 1-step clades are represented by: I-1:(H1, H2), I-2:(H3), I-3:(H4, H5), I-4:(H6, H7) and 2-step clades: II-I:(I1, I2)=(H1, H2, H3), II-2:(I3, I4)=(H4, H5, H6, H7) (FIG. 4).

[0517] The nested contingency analysis (using light=blue, green and not-light=black, brown and hazel eye colors) revealed a significant chi-square value between 2-step clades ((H1+H2+H3) vs. (H4+H5+H6+H7) (chi-square=20.75, p=<0.0001, Fishers P=0.000017). The results showed that Haplotypes H1:ATA, H2:ATC and H3:ACG are significantly and positively associated with light eye colors, where as haplotypes H4:GCA, H5:GCG, H6:GTA and H7:GTG are significantly associated with not-light eye colors. Odds ratio for (H1+H2+H3) presence in individuals of light eye color shade were 3.134 and its 95% C.I. is [1.8871, 5.2051]. Analysis of the results showed that most of the significant variations in eye colors can be traced back to the mutation at site-1.

OCA3LOC920

[0518] The results from analysis of the OCA3LOC920 haplotype system revealed similar phenomena to that described for the OCA3LOC109 system. From the haplotype counts, we observed that the individual OCA3LOC920 haplotypes were associated with the shade of human eye color (chi-square value=15.0293, d.f.=3, p=0.0018; Fisher's exact p=0.0021) (Table 8-5).

[0519] Adjusted residuals for the OCA3LOC920 system revealed that haplotype H1:CAC is found to be significantly associated with light eye color, and haplotypes H2:CGC, and H3:TGC are found to be significantly associated with dark eye color at the p<0.05 level. To isolate the deterministic mutations within the haplotype system we tested the null hypothesis that mutation at site-1, site-2 and site-3 within the system did not contribute any variation in shade of eye color (data not shown). Mutation at site-1 (C←→T, H2: CGC←1→H3:TGC) was found to be marginally associated with eye color shade (Chi-square value=2.8265, d.f.=1, P=0.0927 and Fisher's exact test P-value=0.1414), but mutation at site-2 (A←→G H1: CAC←2→H2:CGC) was found to be significantly associated with the shade of eye color (chi-square value=6.0122, d.f.=1, P=0.0142 and Fisher's exact test P-value=0.0185). Odds ratio for H2: CGC for dark eye color was 1.8677 and its 95% C.I. is [1.1275, 3.0941]. Mutation at site-3 (C←→T H2: CGC←3→H4:CGT) revealed insignificant results. From these results it was inferred that mutation at site-2 contributes toward most of the variation in shade of eye color.

[0520] To determine whether and which specific OCA3LOC920 genotypes (diploid pairs of haplotypes) were associated with eye color shade, the null hypothesis that there was no association between OCA3LOC920 haplotypes and shade of eye color, was tested (Table 8-6). The results revealed that there were indeed associations between OCA3LOC920 genotypes and eye color shade (chi-square value=19.5808, d.f.=6 and P-value=0.0033; Fisher's exact test P-value=0.0027).

[0521] Because these results were significant, when next performed a nested contingency analysis between haplotypes and eye colors, with 0-step clades: H1:CAC, H2:CGC, H3: TGC, H4:CGT, 1-step clades: I-1:(H1), I-2:(H2, H4), I-3:(H3) and 2-step clades: II-1:(I1)=(H1), II-2:(I2, I3)=(H2, H4, H3). The results revealed a significant difference in eye color shade between two step lades (chi-square=14.9709, d.f=1, p=0.0001, exact p=0.0003) (FIG. 5). The odds ratio that individuals with haplotypes among the cladogram sub-group (H2+H3+H4) are dark eye shade individuals is 2.4903 and its 95% C.I.=[1.5534, 3.9924]. This analysis reveals that haplotype H1:CAC is positively and significantly associated with light eye color shade, whereas haplotypes, H2:CGC and H3:TGC are positively significantly associated with dark eye color shade. From inspection of the haplotype subgroups, we inferred that the variation in eye color shade can be traced back to the primary mutation at site-2 within the OCA3LOC920.

MCR3LOC and TYRP3L105

[0522] A similar analyses was performed for SNPs in 6 other genes (AP3B1, CYP3A4, CYP3A5, CYP2D6, CYP2C9, HMGCR, FDPS among others)(Table 8-7). Within these 6 genes, an average of 30 SNPs were discovered per gene, but only two of the genes (MC1R and TYRP1) had SNPs that passed each of our three eye color selection criteria (data not shown). Three haplotype systems were tested in each gene (average number of loci=2.5) for association with specific classes of eye color shade. For each of the systems, the results were statistically insignificant at the p<0.05 level. The best MCV1R haplotype system was the MCR3LOC105 haplotype system comprised of 3 SNPs (markers 217438, 217439, and 217441) distributed more or less evenly across the coding region of the gene (p>0.20). The best TYRP1 haplotype system was TYRP3LOC105, which contained 3 SNPs (markers 886937, 217458, and 217486) distributed more or less evenly across the region between the fourth exon and the 3′ UTR (p=0.144). Because the SNPs comprising these haplotype systems passed the three SNP selection criteria, suggesting that they are capable of explaining at least a small amount of the variation in human eye color, they were incorporated in the analyses described below. The haplotypes were used for these genes rather than their component SNPs because of the enhanced statistical power haplotypes offer for genetic association studies.

[0523] Next, an attempt was made to develop a classification strategy for using the four haplotypes systems to predict eye color. The first approach attempted was a Bayesian method, using the frequencies of the eye color classes as the prior probabilities and the frequency of a (haplotype based) genotype in the eye color class as the class conditional density functions. The posterior probability that an individual belongs to a given class of eye color shade is simply the product of the posterior probabilities derived for each of the four genes, and the eye color class with the highest probability is selected. When applied to our study sample, this method resulted in a classification solution of poor accuracy (about 84%, data not shown) and low utility (less than 80%). By assigning weights to the posterior probabilities for each haplotype system, based on the amount of variance each explains on its own, the accuracy could be improved slightly to 89%, but the utility of the classifier was still low (less than 85%).

[0524] As an alternative to these methods, a nested statistical scheme was developed by which to construct classification rules using complex, compound genotypes. Though a Bayesian classifier could have been used for this task, instead a routine was chosen that resembles a genetic algorithm. Within the scheme, a compound genotype contains elements (haplotype pairs=genotypes) from multiple genes. The scheme builds a classification tree in a step-wise manner. The roots of the tree are genotypes of a randomly selected haplotype system. Nodes are randomly selected genotype classes, within which there are numerous different constituent genotypes. Compound genotype classes contain more than one compound genotype, the constituents of which are derived from a discrete combination of haplotype systems. Edges connect roots and nodes to comprise compound genotype classes. The tree is built by first selecting a set of roots and growing the edges to nodes based on the genetic distinction between individuals of light (blue, green) and dark (black, brown) eye color shade within the new compound genotype class defined by the connection (hazel is always assigned to the eye color shade with the most members). Within a compound genotype class, a pair-wise F statistic and associated p-value is used to measure the genetic structure differences between individuals of the various shade of eye colors, though an exact test p-value has also been used with similar results. Individuals of ambiguous haplotype class (less than 75% certainty) are discarded and classified as “not classifiable”. All possible nodes not yet incorporated in the path from the root are tested during each new branching step, and the branch that results in the most distinctive partition (i.e., the lowest p-value) among the classes of eye color shade is selected. If there is no genetic structure within the new compound genotype class, the branching continues to another node (haplotype system), unless there are no more haplotype systems to consider or unless the sample size for the compound genotype is below a certain pre-selected threshold (in which case a “no-decision” is specified). If the lowest p-value for the new compound genotype class is significant, rules are made from its constituent compound genotypes exhibiting significant chi-square residuals. In this case, genotypes within the compound genotype class which are not explainable (for whom chi-square residuals are not significant) are segregated from the rest of the compound genotypes within the class to form new nested node(s), from which further branching is accomplished. Nested nodes always represent new compound genotype classes at first. If branching from this nested node does not result in the ability to create classification rules, the algorithm returns to the compound genotype class from which the nested node was derived and recreates N nested nodes of N constituent compound genotypes. In either case, nested nodes are only created from nodes with statistically significant population structure differences among the shade of eye color classes. In effect, this algorithm allows for the maximum amount of genetic variance contributed by the various combinations of haplotype systems to be learned within specific genetic backgrounds. Once the tree has been completed, the rules produced from it are used to predict the eye color shade of each individual. If the prediction rate is good (say 95% or greater) the process ends, and if it is not, the process is begun again starting with a new haplotype system for the root.

[0525] A classification tree was generated using this approach with the TYR2LOC920 (markers 217468 and 217473), OCA3LOC920 (markers 217452, 217455, and 712061), OCA3LOC109 (markers 217458, 712054, and 886896), TYRP3L105 (markers 886937, 217485, and 217586) and MCR3LOC105 (markers 886937, 217485, and 217486) haplotype systems (Table 8-8). The roots for the optimal tree selected were genotypes of the TYR2LOC920 haplotype system. The identity and order of the subsequent nodes originating from the various TYR2LOC920 genotype classes were distinct for each particular root. For example, the first node (second haplotype system) selected for TYR2LOC920 AG/CA individuals (rows 1-12, Table 8-8) was the OCA3LOC920 system, though the MCR3LOC105 system was selected as the second node for TYR2LOC920 AG/AG individuals (rows 15-22, Table 8-8). The effect statistics for the branching process are shown in Table 8-9. Comparing this Table with the specific rules in Table 8-8, it is clear that all decisions to formulate classification rules for a compound genotype were justified by the existence of population level genetic structure differences within the compound genotype class from which it was derived. A number of rules were formed from compound genotype classes for which measures of population level genetic structure differences were not calculable. Usually, this was because there was only one compound genotype class for one or both of the hair color shade groups (the test requires genetic diversity within each population). In these cases, chi-square residuals on the compound genotypes justified the construction of classification rules incorporating them (requiring a p<0.05, data not shown). Sometimes, rules could be constructed for compound genotypes derived from compound genotype classes of small sample size (i.e., n<15), because the distribution of genotypes among the eye color shades were clearly partitioned as measured using the chi-square residuals. For example, only 9 individuals were part of the TYR2LOC920 AG/AG:MCR3LOC106 OTHER (not CCC/CYC) compound genotype class, but these 9 individuals partitioned nicely among the eye color groups with a F-statistic P=0.027+/−0.014. In some cases, significant chi-square residuals were obtained for compound genotypes of quite low sample size because individuals with these genotypes were all of darker eye color shade which were under-represented in our study by a ratio of about 1:2.

[0526] Tabulating the number of correct and incorrect classifications that result from application of the optimal classification tree (Table 8-8), it was observed that 208 individuals were correctly classified, whereas only 8 were misclassified. Thus, the accuracy rate of the solution was 96.3% (Table 8-10). Thirty three individuals were not classified. In rare cases, these inconclusive determinations were the result of small sample sizes within the compound genotype class that negatively impacted the p-values even if there was a good segregation of compound genotypes among the hair color shade classes. In most cases, the chi-square statistic residuals for the compound genotype classes for these individuals were statistically insignificant because the compound genotype class simply did not allow an explanation of the individual's eye color shade. For these individuals, the four gene, five haplotype system model that was employed simply did not “work”. The (computationally derived) haplotype phase of 27 individuals were not certain at the 75% level, and thus no classification could be made for them. Combining the inconclusive determinations with the un-haplotypable, a total of 60 individuals were not classifiable in our study. Thus, the solution exhibited a utility for 81% of Caucasians tested. However, within haplotype-certain Caucasians (a more relevant group for the determination since haplotype uncertainty can be easily eliminated by a user of the test) the solution exhibited a utility for 87% of Caucasians. We also tested the solution on individuals of other races (Asians and African Americans). When applied to African Americans, Caucasians and Asians, the accuracy of our solution improved to 99.9%, with 98% of the individuals classifiable.

[0527] The tree in Table 8-9 follows the same format shown in Table 8-8, and shows the pair-wise F-statistic P values used within a compound genotype class to infer genetic structure differences between groups of individuals of different eye colors. The ability to partition individuals within a compound genotype class in a manner that is statistically significant using this test imparts justification by which to formulate classification rules for particular genotypes within the compound system (see text and Table 8-8). The rules are constructed from chi-square residuals as described in the text. The haplotype system used to construct compound genotypes within each row (compound genotype) is indicated in each column. If a genotype is provided with the haplotype designation (ex. OCA3LOC109 ATA/ATR), the node comprises individuals of only these genotypes. Degenerate nucleotide positions are indicated with IUB codes. The tree is read from left to right starting with the operator *if*. The first column contains the root (see text) of a compound genotype class. Progressing to the next column to the right, the operator *and* is used to include the first node (if any), and then the second (if any) and so on until a statistically significant partition can be made within the new compound genotype class. If individuals of different eye color shades within this new compound genotype class can be partitioned into subgroups of statistically significant genetic structure (described in the text, using a pair-wise F-statistic test), the process terminates along a row at the relevant P value for the test. If not, this process continues to the next haplotype system to the right. When (or if) statistical significance is achieved, the compound genotypes are used to construct classification rules (shown in FIG. 4 and discussed in text) for the pertinent individuals. For example, considering rows one through three, there is no statistical association between OCA3LOC920 genotypes and eye color within the class of individuals with a TYR2LOC920 AG/CA genotype. Thus, the path leads to the MCR3LOC106 haplotype system in the second column. Individuals of the compound genotype class TYR2LOC920 AG/CA:OCA3LOC109 CAC/CAC (rows 1 and 2) thus comprised a new compound genotype class. Members of this class are partitionable along eye color classes using the MCR3LOC106 haplotype system in column 3. For example, TYR2LOC920 AG/CA:OCA3LOC109 CAC/CAC individuals with the MCR3LOC106 OTHER (not CCC/CYC) genotype were partitionable into the various eye color shade classes as indicated by statistically significant differences in the MCR3LOC106 haplotype composition between light (blue, green) and dark eye (brown or black) individuals within the compound genotype class (P<0.001+/−0.001, n=33). Thus, classification rules were constructed for individuals of particular compound TYR2LOC920:0CA3LOC920:MCR3LOC106 genotypes. P=INCALC means that the P value was not calculable. The most common reason for this is genetic homogeneity within one or both of the eye color classes for the compound genotype in question. The pair-wise method measures the average number of differences within groups compared to that number between groups, and this genetic homogeneity within the final haplotype system of a compound class makes the calculation of the within group difference technically impossible. In this case, chi-square residuals were used to justify the formulation of classification rules.

Discussion

[0528] A four gene five haplotype system model for genetically predicting human eye color, is described in this Example. To our knowledge this is the first such model described. The solution derived from this model is capable of correct classification 96.3% of the time, conditional on the race of the DNA donor being Caucasian. If there is equal probability that the race of the donor is Caucasian, African or Asian, the accuracy of the solution improves to 99.9%, and the utility (the ability to make a decision) improves from 81% to 98%. Most non-Caucasian ethnic groups exhibit low variability in eye color, so this improvement may not seem surprising. However, though the variability of eye color is relatively low in these ethnic groups, an incorrect solution would not necessarily be more accurate when applied unconditionally to individuals of the various world populations. Notwithstanding genetic heterogeneity, a correct solution would be more accurate when so applied. The reason for this is that if alleles associated with darker eye color in Caucasians are deterministic, or linked to deterministic alleles for melanin production and eye color, and if we assume genetic heterogeneity in eye color determination is low, the frequencies of these alleles should be greater in populations of average darker eye color. In fact, the accuracy of the solution increases when applied pan-ethnically because all of the dark-eye associated haplotypes that are part of the solution, as well as each of their component SNPs individually, were found in greater frequencies in non-Caucasian ethnic groups. Therefore, the fact that the accuracy of the complex solution improves when applied pan-ethnically confirms the validity of the solution and suggests that genetic heterogeneity in eye color determination is low in the world population.

[0529] Though our solution is 96.3% accurate in “classifiable” individuals, 18% of the total number of Caucasians we tested were not classifiable with our solution. About half of these individuals were individuals of rare compound haplotype classes, which are problematic because: 1) their haplotype phase determination is uncertain using computational (i.e., probabilistic) methods and 2) the sample size for the compound genotype classes within which they fall is too small for statistically significant rules to be constructed (which was rarely the case). Biochemical, rather than computational haplotyping would eliminate group 1) individuals and larger sample sizes (and additional work) may eliminate group 2) individuals. In both cases, the solution disclosed in this Example will have to be augmented to accommodate these rare haplotypes (if they are even classifiable). However, the other half of the not-classifiable group of individuals were simply not explained by our solution at all. These represent individuals within compound genotype classes that do not neatly segregate into (i.e., were not statistically associated with) the various eye color shades. For these individuals, it seems that either: 1) other SNPs within the genes we surveyed are deterministic for eye color shade, and therefore, our solution does not explain all of the variability that these four genes contribute towards variability in the trait and/or 2) other loci altogether are deterministic for eye color shade within certain genetic backgrounds derived from the model. The likelihood of the former of these possibilities seems low since our approach for discovering SNPs was comprehensive. The latter possibility seems more likely, but invoking it would require the assumption that the contribution of a genotype at a particular locus is dependent on the genetic background within which it is found. Indeed, inspection of the solution we have generated confirms that this is the case for almost all genotypes part of the solution. We therefore assert that the utility of our solution is about 87% in Caucasians of known TYR, OCA2, MCV1R and TYRP haplotypes, and that the amount of eye color shade variance our model could explain is likely to be somewhat higher, though limited by the as of yet unquantified involvement of other loci that we have not part of this study.

[0530] Though ours is a four gene model, it is not inconsistent with Brue's assertion that retinal pigmentation is predominantly controlled by the activity of two loci. The best classification tree (i.e., solution) derived from our algorithm incorporated the haplotype system from the TYR gene as the root. Four of the five first nodes were genotypes of the haplotype system from the OCA2 gene. It is interesting to note that, of the four genes we used for classification rule construction, these two were by far the most significantly associated with eye color. Even though two thirds of Caucasians required haplotype systems in other genes (MCV1R and TYRP1) to be correctly classified, about a third of the individuals (68) were correctly classifiable based on TYR and OCA genotype alone and virtually none of the eye color variation in our study was explainable with compound genotypes not including the TYR and OCA2 systems. These observations combine to strongly suggest that the TYR and OCA2 genotypes combine to explain most of the variability in Caucasian eye color, and that other genes (mainly MCV1R, TYRP, and perhaps others) contribute to explain a small amount of this variation. These observations are not inconsistent with Brues' model. Nonetheless, the complexity of our model illustrates a crucial point for developing classifier tests. Though most of the variation in human eye color can be explained by two genes, and reasonable classifier tests can be constructed based on them alone, we have shown that the tests so developed perform with an accuracy that is unacceptable for use in the field or clinic. Results of the studies discussed in this Example indicate that the simple approach of using individual haplotypes as discrete objects rather than components of complex objects leads to classification solutions that perform poorly (although they still perform, to a certain extent). Not to be limited by theory, this may be because eye color is a complex genetic trait, and complex genetic “wholes” are often times greater than the sum of their component “parts”. Measuring classification probabilities as a function of individual haplotype frequencies does not allow for the capture all of the trait variation the genes combine to explain. Our results illustrate a seemingly obvious but interesting concept: simple genetics approaches are useful for ascribing trait associations for individual genes and haplotypes within them, but because most human traits are complex, complex genetics tools are required to use these genes and haplotypes for the development of accurate classification tests. In our case, we had to consider individuals in terms of compound genotypes (i.e., analogous to n-dimensional feature vectors plotted in the n-dimensional feature space) in order to develop an accurate classifier. This idea has precedence from studies in Drosophila, where allelic penetrance for a large number of complex traits has been shown to be a function of genetic background.

[0531] Interestingly, the solution generated as discussed in this example does not appear to explain variable hair or skin color (data not shown). In fact, this is what one would expect from a good eye color solution for Caucasians since eye, skin and hair color are independently inherited and distributed within this racial group. Our solution is also usually not sensitive enough to predict the precise eye color of an individual. Rather, it can only be used to classify a biological specimen as having been derived from an individual of a given shade of eye color. This also portends the involvement of other genes and/or variant(s) in the determination of this complex trait. The accuracy of the solution for explaining variable eye color in members of other ethnic groups is not yet known with precision due to the low number of minor eye colors in these groups (which are difficult to obtain). Nonetheless, as the first genetic solution capable of ascribing qualitative characteristics from anonymously donated DNA, our results represent a potentially important achievement. First, they illustrate one method for dissecting complex human traits using high-throughput genomics techniques. Second, as a forensics tool, our solution could be used to guide criminal or other forensics investigations. Third, as a research tool, the common haplotypes we have identified may help researchers more accurately define risks for pigmentation related diseases such as cataracts and melanoma.

TABLE 8-1

| | | H2: AG | | | |
|---|---|---|---|---|---|
| Haplotypes | H1: CG | Haplotypes | H3: CA | and | H4: AA |
| Eye colors | H1 | H2 | H3 | H4 | Total |
| Light | 86 | 86 | 74 | 0 | 246 |
| Not-Light | 135 | 107 | 72 | 2 | 316 |
| TOTAL | 221 | 193 | 146 | 2 | 562 |

Table 8-1. Individual TYR2LOC920 haplotype classes in the various shade of eye color classes. Dark - black, brown or hazel and Light - blue or green. The total number of individuals counted within each class is shown on the bottom row, and the total number of individuals of each haplotype are shown in the last column.

[0532] TABLE 8-2

| | | | |
|---|---|---|---|
| Genotypes | G11 = CG/CG | G12 = | G13 = |
| | | CG/AG | CG/CA |
| | G22 = AG/AG | G23 = | G24 = |
| | | AG/CA | AG/AA |

| | |
|---|---|
| Eye | Genotypes |

| | | | | | | | |
|---|---|---|---|---|---|---|---|
| colors | G11 | G12 | G13 | G22 | G23 | G24 | Total |

| | | | | | | | |
|---|---|---|---|---|---|---|---|
| Light | 4 | 36 | 42 | 9 | 32 | 0 | 123 |
| Not-Light | 25 | 36 | 49 | 23 | 23 | 2 | 158 |
| Total | 29 | 72 | 91 | 32 | 55 | 2 | 281 |

Table 8-2. TYR2LOC920 genotype counts for the various classes of eye color shade. The genotype designations are shown at the top of the table. Not-light - black, brown or hazel and Light - blue or green. The total number of individuals counted within each class is shown on the bottom row, and the total number of individuals of each genotype are shown in the last column.

[0533] TABLE 8-3

| | | | |
|---|---|---|---|
| Haplotype\Eye color | Light | Not-light | Total |

| | | | |
|---|---|---|---|
| H1: ATA | 201 | 53 | 254 |
| H2: ATG | 106 | 43 | 149 |
| H3: ACG | 2 | 0 | 2 |
| H4: GCA | 51 | 31 | 82 |
| H5: GCG | 31 | 25 | 56 |
| H6: GTA | 3 | 6 | 9 |
| H7: GTG | 4 | 6 | 10 |
| Total | 398 | 164 | 562 |

Table 8-3. Individual OCA3LOC109 haplotype counts in the various classes of eye color shade. Dark - black, brown or hazel and Light - blue or green. The total number of individuals counted within each class is shown on the bottom row, and the total number of individuals of each haplotype are shown in the last column.

[0534] TABLE 8-4

| | | | |
|---|---|---|---|
| Genotype\Eye color | Light | Not-light | Total |

| | | | |
|---|---|---|---|
| G11: (ATA, ATA) | 47 | 11 | 58 |
| G12: (ATA, ATG) | 55 | 10 | 65 |
| G13: (ATA, ACG) | 1 | 0 | 1 |
| G14: (ATA, GCA) | 29 | 7 | 36 |
| G15: (ATA, GCG) | 16 | 6 | 22 |
| G16: (ATA, GTA) | 3 | 4 | 7 |
| G17: (ATA, GTG) | 3 | 4 | 7 |
| G22: (ATG, ATG) | 16 | 6 | 22 |
| G23: (ATG, ACG) | 1 | 0 | 1 |
| G24: (ATG, GCA) | 8 | 8 | 16 |
| G25: (ATG, GCG) | 10 | 10 | 20 |
| G26: (ATG, GTA) | 0 | 1 | 1 |
| G27: (ATG, GTG) | 0 | 2 | 2 |
| G44: (GCA, GCA) | 5 | 6 | 11 |
| G45: (GCA, GCG) | 3 | 4 | 7 |
| G47: (GCA, GTG) | 1 | 0 | 1 |
| G55: (GCG, GCG) | 1 | 2 | 3 |
| G56: (GCG, GTA) | 0 | 1 | 1 |
| Total | 199 | 82 | 281 |

Table 8-4. OCA3LOC109 genotype (diploid haplotype pair) classes in the various shade of eye color classes. Dark - black, brown or hazel and Light - blue or green. The total number of individuals counted within each class is shown on the bottom row, and the total number of individuals of each haplotype. are shown in the last column.

[0535] TABLE 8-5

| | | | |
|---|---|---|---|
| Haplotype\Eye color | Dark | Light | Total |

| | | | |
|---|---|---|---|
| H1: CAC | 126 | 353 | 479 |
| H2: CGC | 30 | 45 | 75 |
| H3: TGC | 9 | 5 | 14 |
| H4: CGT | 1 | 5 | 6 |
| Total | 166 | 408 | 574 |

Table 8-5. Individual OCA3LOC920 haplotype classes in the various shade of eye color classes. Dark - black, brown or hazel and Light - blue or green. The total number of individuals counted within each class is shown on the bottom row, and the total number of individuals of each haplotype are shown in the last column.

[0536] TABLE 8-6

| | | | |
|---|---|---|---|
| Genotype\Eye color | Dark | Light | Total |

| | | | |
|---|---|---|---|
| G11: (CAC, CAC) | 50 | 151 | 201 |
| G12: (CAC, CGC) | 19 | 42 | 61 |
| G13: (CAC, TGC) | 6 | 5 | 11 |
| G14: (CAC, CGT) | 1 | 4 | 5 |
| G22: (CGC, CGC) | 4 | 1 | 5 |
| G23: (CGC, TGC) | 3 | 0 | 3 |
| G24: (CGC, CGT) | 0 | 1 | 1 |
| Total | 83 | 204 | 287 |

Table 8-6. OCA3LOC109 genotype (diploid haplotype pair) classes in the various shade of eye color classes. Dark - black, brown or hazel and Light - blue or green. The total number of individuals counted within each class is shown on the bottom row, and the total number of individuals of each haplotype are shown in the last column.

[0537] TABLE 8-7

| | | HAPLOTYPE | |
|---|---|---|---|
| GENE | PARTITION | SYSTEM | TEST STATISTICS |
| TYR | DARK + HAZ/LIGHT | TYR2LOC920 | HAPLOTYPE |
| OCA2 | DARK/LIGHT + HAZ | OCA3LOC109 | HAPLOTYPE |
| OCA2 | DARK/LIGHT + HAZ | OCA3LOC920 | HAPLOTYPE |
| TYRP | DARK/LIGHT + HAZ | TYRP3L05 | SNP |
| MC1R | DARK/LIGHT + HAZ | MCR3LOC106 | SNP |

Summary of analyses at the level of the single gene haplotype system. The gene within which the haplotype system is found is shown in column one (GENE). The distinction of light and dark classes of eye color shade is shown in column 2 (PARTITION). The haplotype system is shown in column 3, and the level of complexity for which the statistically significant results were obtained is shown in column 4.

[0538] TABLE 8-8

| TYR2LOC | OCA3LOC | OCA3LOC | MCR3LOC | OCA3LOC | TYRP3L | | | | |
|---|---|---|---|---|---|---|---|---|---|
| 920 | 920 | 109 | 105 | 109 | 106 | CLASS | CORR | INCLASS | INCORR |

| | | | | | | | | | |
|---|---|---|---|---|---|---|---|---|---|
| 1. AG/CA | CAC/CAC | | CCC/CYC | | GTT/GTT | DK/HAZ | 7 | 0 | 2 |
| 2. AG/CA | CAC/CAC | | CCC/CYC | | GTT/TTT | LT/HAZ/BI | 6 | 0 | 0 |
| 3. AG/CA | CAC/CAC | | CCC/CYC | | GGA/GGT | INCONCL. | 0 | 4 | 0 |
| 4. AG/CA | CAC/CAC | | CCC/CYC | | GGA/GTT | BLOND | 8 | 0 | 0 |
| 5. AG/CA | CAC/CAC | | CCC/CYC | | GGA/GGA | DK | 2 | 0 | 0 |
| 6. AG/CA | CAC/CAC | | CCC/CYC | | GGT/TGA | LT/HAZ | 4 | 0 | 0 |
| 7. AG/CA | CAC/CAC | | NOT CCC/CYC | | | LT/HAZ | 14 | 0 | 1 |
| 8. AG/CA | NGC/NNN | | CCC/CCY | | | LT/HAZ | 9 | 0 | 0 |
| 9. AG/CA | NGC/NNN | | CCC/CTC | | | DK/HAZ | 3 | 0 | 0 |
| 10. AG/CA | NGC/NNN | | OTHER | | | NOT OBS | 0 | 0 | 0 |
| 11. AG/CA | TNC/CNC | | | | | DK | 2 | 0 | 0 |
| 12. AG/CA | OTHER | | | | | INSUFF | 0 | 1 | 0 |
| | | | | | | TOTAL | 55 | 5 | 3 |
| 13. AG/AG | | | CCC/CYC | ATA/ATR | GTT/KTT | DK/HAZ | 3 | 0 | 0 |
| 14. AG/AG | | | CCC/CYC | ATA/ATR | GGA/GKY | LT/HAZ | 5 | 0 | 0 |
| 15. AG/AG | | | CCC/CYC | ATG/ATG | | INCONCL | 0 | 4 | 0 |
| 16. AG/AG | | | CCC/CYC | GYR/ATR | | DK/HAZ | 7 | 0 | 1 |
| 17. AG/AG | | | CCC/CYC | OTHER | | LT/HAZ | 4 | 0 | 0 |
| 18. AG/AG | | | CCC/TCC | | | LT/HAZ | 5 | 0 | 0 |
| 19. AG/AG | | | CCC/CCT | | | HAZ | 4 | 0 | 0 |
| 20. AG/AG | | | OTHER | | | NOT OBS | 0 | 0 | 0 |
| | | | | | | TOTAL | 28 | 4 | 1 |
| 21. CG/CG | CAC/YRC | | CCC/CCC | | | DK/HAZ | 13 | 0 | 0 |
| 22. CG/CG | CAC/YRC | | CCC/CTC | | | LT/HAZ | 4 | 0 | 0 |
| 23. CG/CG | CAC/YRC | | OTHER | | | DK | 3 | 0 | 0 |
| 24. CG/CG | OTHER | | | | | DK | 3 | 0 | 0 |
| | | | | | | TOTAL | 23 | 0 | 0 |
| 25. CG/AG | | ATA/ATG | | | | LT/HAZ | 16 | 0 | 2 |
| 26. CG/AG | | ATG/GCG | | | | LT | 4 | 0 | 0 |
| 27. CG/AG | | ATA/ATA | CCC/CCC | | | LT/HAZ | 6 | 0 | 1 |
| 28. CG/AG | | ATA/ATA | OTHER | | | DK/HAZ | 5 | 0 | 0 |
| 29. CG/AG | | ATG/ATG | | | | INCONCL | 0 | 6 | 0 |
| 30. CG/AG | | GTA/ATA | | | | DK | 2 | 0 | 0 |
| 31. CG/AG | | GCG/GCG | | | | DK/HAZ | 1 | 0 | 0 |
| 32. CG/AG | | GCA/GCA | CCC/CCC | | | LT | 3 | 0 | 0 |
| 33. CG/AG | | GCA/GCA | OTHER | | | DK | 1 | 0 | 0 |
| 34. CG/AG | | GCA/ATA | CCC/CCC | | | DK | 4 | 0 | 0 |
| 35. CG/AG | | GCA/ATA | CCC/CTC | | | INCONCL | 0 | 3 | 0 |
| 36. CG/AG | | GCA/ATA | CCC/CCT | | | LT | 1 | 0 | 0 |
| 37. CG/AG | | OTHER | | | | NOT OBS | 0 | 0 | 0 |
| | | | | | | TOTAL | 43 | 9 | 3 |
| 38. CG/CA | | ATA/ATA | CCC/YYC | | | LT/HAZ | 15 | 0 | 0 |
| 39. CG/CA | | ATA/ATA | OTHER | | | INCONCL | 0 | 4 | 0 |
| 40. CG/CA | | ATA/ATG | CCC/YYC | | | LT/HAZ | 13 | 0 | 1 |
| 41. CG/CA | | ATA/ATG | CCC/CCT | | | INCONCL | 0 | 4 | 0 |
| 42. CG/CA | | ATA/ATG | OTHER | | | NOT OBS | 0 | 0 | 0 |
| 43. CG/CA | | ATG/ATG | | | | LT/HAZ | 7 | 0 | 0 |
| 44. CG/CA | | ATA/GCA | | | | LT/HAZ | 20 | 0 | 0 |
| 45. CG/CA | | GCA/GCA | | | | INCONCL | 0 | 2 | 0 |
| 46. CG/CA | | ATG/GCG | | | | INCONCL | 0 | 4 | 0 |
| 47. CG/CA | | ATG/ACG | | | | INCONCL | 0 | 1 | 0 |
| 48. CG/CA | | GCA/GCG | | | | DK/HAZ | 4 | 0 | 0 |
| 49. CG/CA | | OTHER | | | | NOT OBS | 0 | 0 | 0 |
| | | | | | | TOTAL | 59 | 15 | 1 |
| ALL CLASSES | | | | | | TOTAL | 208 | 33 | 8 |
| | | | | | | TOTAL* | 96% | | 3% |

Table 8-8. Classification tree incorporating haplotype systems described herein to categorize individuals as dark or light eye individuals.

[0539] TABLE 8-9

| | | | | | |
|---|---|---|---|---|---|
| CONDITION 1 | CONDITION 2 | CONDITION 3 | CONDITION 4 | P VALUE | N |

| | | | | | |
|---|---|---|---|---|---|
| 1) TYR2LOC920 AG/CA | OCA3LOC920 CAC/CAC | MCR3LOC106 CCC/CYC | TYRP3L105 | P < 0.001 +/− 0.001 | 33 |
| 2) TYR2LOC920 AG/CA | OCA3LOC920 CAC/CAC | MCR3LOC106 OTHER | | P = 0.027 +/− 0.014 | 14 |
| 3) TYR2LOC920 AG/CA | OCA3LOC920 YGC/CRC | MCR3LOC106 | | P < 0.001 +/− 0.001 | 14 |
| 4) TYR2LOC920 AG/AG | MCR3LOC106 CCC/CYC | OCA3LOC109 ATA/ATR | TYRP3L105 | P = 0.045 +/− 0.024 | 8 |
| 5) TYR2LOC920 AG/AG | MCR3LOC106 CCC/CYC | OCA3LOC109 OTHER | | P = INCALC | 13 |
| 6) TYR2LOC920 AG/AG | MCR3LOC106 OTHER | | | P = 0.027 +/− 0.014 | 9 |
| 7) TYR2LOC920 CG/CG | OCA3LOC920 YRC/CAC | MCR3LOC106 | | P < 0.001 +/− 0.001 | 20 |
| 8) TYR2LOC920 CG/CG | OCA3LOC920 OTHER | | | P = INCALC | 3 |
| 9) TYR2LOC920 CG/AG | OCA3LOC109 ATA/ATA | MCR3LOC106 | | P = INCALC | 13 |
| 10) TYR2LOC920 CG/AG | OCA3LOC109 GCA/GCA | MCR3LOC106 | | P = INCALC | 4 |
| 11) TYR2LOC920 CG/AG | OCA3LOC109 GCA/ATA | MCR3LOC106 | | P = INCALC | 8 |
| 12) TYR2LOC920 CG/AG | OCA3LOC109 OTHER | | | P = 0.045 +/− 0.015 | 58 |
| 13) TYR2LOC920 CG/CA | OCA3LOC109 ATA/ATA | MCR3LOC106 | | P = INCALC | 19 |
| 14) TYR2LOC920 CG/CA | OCA3LOC109 ATA/ATG | MCR3LOC106 | | P = INCALC | 18 |
| 15) TYR2LOC920 CG/CA | OTHER | | | P = 0.018 +− 0.018 | 42 |
| TOTAL | | | | | 276 |

Table 8-9. Effect statistics for the formulation of classification tree rules shown in Table 8-8.

[0540] TABLE 8-10
Table 8-10 Final counts from the classification solution of Table 8-8.

SOLUTION RESULTS

| | COUNT | PERCENT |
|---|---|---|
| CORRECT | 208 | 96.30% |
| INCORRECT | 8 | 3.70% |

### EXAMPLE 9

### Classification Model Eye Color Analysis

[0541] The following example further discusses the classification model presented in Example 8, that generated the preferred eye color solution involving optimal haplotype systems for four different genes, described therein. Our goal was to develop a classification solution for human eye color. About 300 Caucasians of variable eye color were genotyped for an average of 30 SNP markers in 5 genes known to be involved in melanin production. The results showed that alleles of SNPs in the TYR, TYRP1, OCA2 and MC1R genes showed statistical associations with certain human eye colors and/or shades, as discussed in Example 8. However, the relationship between allele and eye color/shade was one of bias. Though the associations between SNP alleles and eye color/shade were statistically significant, on their own, the markers make for poor predictive tools because the error rate of classification is too high. This suggested that the discovered SNPs were component pieces of a larger, more complex puzzle.

[0542] Given what is known about the inheritance of eye color, this is not an unreasonable hypothesis. Specifically, eye color is a complex trait, not a simple Mendelian trait. Although there is an element of dominance for darker eye colors, knowing the eye color of a mother and father do not allow one to predict with accuracy the eye color of the children. This is because eye color is a function of multiple genes interacting among themselves, rather than a single gene. Given that a collection of SNPs that were informative for human eye color had been identified, the SNPs were considered in terms of both inter and intra-genic complexity.

[0543] To perform this, the best combination of markers within each of the genes for explaining eye color, were identified. In the next step (see below) these optimal haplotype systems for each of the four genes were combined in an inter-genic analysis to develop the final solution.

Step 1. Intra-Genic Complexity.

[0544] For each of these four genes, random SNP (marker) combinations were selected to constitute a haplotype system. For each haplotype system, raw genotypes were converted into haplotypes using computational inference (Stephens and Donnelly, 2000), and individuals were grouped into one of two groups of eye shade; light (blue, green, gray or hazel eyes) or dark (light brown, medium brown, dark brown or black eyes). To test for population structure differences between these groups, a pair-wise F-statistic (or in some cases, a Fishers exact test of sample differentiation) was calculated. The F statistic is based on genetic distances for short divergence time. The Exact test of population differentiation tests the non-random distribution of haplotypes into population samples under the hypothesis of panmixia. P-values calculated from these tests were stored. The process was repeated until all of the possible haplotype systems for the gene were tested. At this point, the haplotype systems showing the lowest P-values were selected for further analysis.

[0545] For example, the OCA2 gene had 19 SNPs with alleles that were biased for one of the two classes of eye shade (for a list of the SNPs identified in this Example as having predictive value for human eye color, see Table 9-1). Using this approach several haplotype systems were identified that each had predictive value for human eye color. The haplotype systems used for this work are defined, in order from left to right, as follows:

| | |
|---|---|
| TYR2LOC920 | Markers 217468, 217473 |
| OCA3LOC920 | Markers 217452, 217455, 712061 |
| OCA3LOC109 | Markers 217458, 712054, 886896 |
| MCR3LOC106 | Markers 217438, 217439, 217441 |

[0546] For a description of each of these SNPs (Markers), please see Example 10 below. The markers are also included in the comprehensive list of claimed SNPs in Table 1.

[0547] As discussed in Example 10, the TYR2LOC920 and OCA3LOC109 haplotype systems are especially informative. Persons of dark eye color tend to have different haplotypes, and diploid combinations of haplotypes (haplotype pairs) than persons of lighter eye color as measured by the pair-wise F statistic. The P value for these statistics is shown below in Table 9-2. For the TYRP and MC1R systems which did not have p values that indicated statistical significance, analysis was continued despite this because their component alleles, found to be associated with darker eye colors, were more frequently found in (indeed, they were practically monomorphic in) persons of African American or Asian descent. Because the average eye color of these ethnic groups is darker than Caucasians, and due to the nature of the gene in which the SNPs occur, the markers may be useful eye color markers on a complex genetic level. Indeed, this turned out to be the case (see Table 8-8).

Step 2. Inter-Genic Complexity.

[0548] Once the interesting haplotype systems had been defined for each gene, Classification rules based on these haplotype systems were then developed using a nested statistical approach (see Example 12). First, individuals were stratified based on their genotype at the TYR2LOC920 haplotype system. For example, individuals with CG/CA genotype were segregated from the rest. If all or most of these individuals were blue, green, hazel, brown, light (blue or green) or dark (brown or hazel) eye individuals (as measured using a pair-wise F statistic), a rule was formulated stating that if an individual had the TYR2LOC920 CG/CA genotype, they belonged to the appropriate eye color class. It so happens, that this rule was not possible to make. Therefore, individuals within the TYR2LOC920 CG/CA class were partitioned based on their genotypes for several other haplotype systems (randomly selected) and a pair-wise F statistic test was used to determine whether there was population structure differences between individuals of the various new compound genotypes and the various eye color classes. The haplotype system that showed the best ability to partition the subjects based on eye color was selected. For the OCA3 gene, this haplotype system happened to be the OCA3LOC109 system (P=0.018+/−0.018). For many OCA3LOC109 genotypes within the TYR2LOC106 CG/CA class it was possible to construct classification rules. For example, 7 of 7 individuals with the TYR2LOC106 CG/CA genotype and OCA3LOC109 ATG/ATG genotype (see Table 8-8) were of light eyes. This number is statistically significant. Therefore, we constructed a rule stating that if a person is found to have this compound genotype, they can be classified into the light eye group. For other OCA3LOC109 genotypes within this TYR2LOC920 class, it was not possible to make rules, so a third term was added to the model in the same manner as was the second term. It so happens that the best haplotype system for resolving TYR2LOC920 CG/CA:OCA3LOC109 ATA/ATA individuals, based on eye color, was the MCR3LOC105 haplotype system; 15 of 15 individuals with the TYR2LOC920 CG/CA:OCA3LOC109 ATA/ATA:MCR3LOC105 CCC/YYC compound genotype class were of light or hazel eyes. Thus, a rule was formed form this observation.

[0549] All of the rules, formulated in the above manner, appear in the classification tree presented as Table 8-8. Each classification results from a statistical decision. The effect statistics for these decisions are presented in the classification tree that is presented as Table 8-10. The tree follows the same format shown in Table 8-8, and shows the pair-wise F-statistic P values used within a compound genotype class to infer genetic structure differences between groups of individuals of different eye colors. The ability to partition individuals within a compound genotype class in a manner that is statistically significant is used as justification by which to formulate classification rules for particular genotypes within the compound system (see Table 8-8).

[0550] The tree in Table 8-10 is read from left to right. Within a column, the haplotype system is listed and the genotype class for that system appears to the immediate right. Individuals of a given class within the haplotype system identified in a column are partitioned into genotype classes for the next haplotype system to the right (if any). If individuals within this new compound genotype class can be partitioned into subgroups, based on eye color shade (described in the text), that are statistically distinct with regard to haplotype composition (using a pair-wise F-statistic test), the process terminates along a row at the relevant P value for the test. If not, this process continues to the next haplotype system to the right. When (or if) statistical significance is achieved, the compound genotypes are used to construct classification rules (shown in Table 8-8) for the pertinent individuals.

[0551] For example, considering rows one through three, there is no statistical association between OCA3LOC920 genotypes and eye color within the class of individuals with a TYR2LOC920 AG/CA genotype. Thus, the path leads to the MCR3LOC106 haplotype system for individuals of each compound TYRP2LOC920:OCA2LOC920 class. For the example shown in row two, there were statistically significant differences in the MCR3LOC106 haplotype composition between light (blue, green) and dark eye (brown or black) individuals within the compound TYR2LOC920 AG/CA, OCA2LOC920 CAC/CAC genotype class (P<0.001+/−0.001, n=33). Thus, classification rules were constructed for individuals of particular compound TYR2LOC920:OCA3LOC920:MCR3LOC106 genotypes.

[0552] For some of the haplotypes (listed as “P=INCALC”) the P value was not calculable. The most common reason for this is genetic homogeneity within one or both of the eye color classes for the compound genotype in question. The pair-wise method measures the average number of differences within groups compared to that number between groups, and this genetic homogeneity within the final haplotype system of a compound class makes the calculation of the within group difference impossible.

[0553] The combined solution tree described in Table 8-8 and Table 8-10 results in the correct classification of 208 individuals, the incorrect classification of 8 individuals, and an inconclusive result for 33 individuals (see Table 8-9). Thus, the solution has an accuracy rate of 96%, which makes it a useful tool for predicting human eye color from DNA.

TABLE 9-1

SNPS WITH ALLELES THAT SEGREGATE PREFERENTIALLY
IN EITHER DARK OR LIGHT EYE COLOORED
CAUCASIANS:

| | | | | | INTE- |
|---|---|---|---|---|---|
| GENE | SNPNAME | MARKER | LOCATION | GENBANK | GRITY |
| 1. | | | | | |
| OCA2 | OCA2_2 | 217452 | 17264 | 13651545 | POLY |

217452 OCA2_2

| | | | |
|---|---|---|---|
| | CC | CT | TT |
| BRN | 28 | 0 | 0 |
| HAZL | 25 | 0 | 0 |
| GRN | 17 | 0 | 0 |
| BLUE | 39 | 0 | 2 |

JUSTIFICATION: This SNP is part of the OCA3LOC920
haplotype system, the utility of which has been
demonstrated in the text elsewhere in this patent.
It can be seen from this distribution that only
blue eyed individuals carry the T allele.
2.

| | | | | | |
|---|---|---|---|---|---|
| OCA2 | OCA2_5 | 217455 | 21103 | 13651545 | POLY |

217455 OCA2_5

| | | | |
|---|---|---|---|
| | AA | GA | GG |
| BRN | 19 | 9 | 0 |
| HAZL | 18 | 7 | 1 |
| GRN | 13 | 4 | 0 |
| BLUE | 23 | 11 | 0 |

JUSTIFICATION: This SNP is part of the OCA3LOC109
and OCA3LOC920 haplotype systems, the utility of
which has been demonstrated in the text elsewhere
in this patent. As can be seen from this distribu-
tion, the G allele is enriched for individuals of
darker (brown and hazel) eye color. In particular,
green eyed individuals rarely carry the G allele.
3.

| | | | | | |
|---|---|---|---|---|---|
| OCA2 | OCA2_6 | 217456 | 26558 | 13651545 | POLY |

217456 OCA2_6

| | | | |
|---|---|---|---|
| | AA | GA | GG |
| BRN | 0 | 4 | 22 |
| HAZL | 0 | 4 | 19 |
| GRN | 0 | 1 | 14 |
| BLUE | 0 | 2 | 27 |

JUSTIFICATION: As can be seen from this distribu-
tion, the freguency of the A allele is greater in
individuals with darker eye colors than lighter
(blue and green). The ratio of genotypes AA:GA:GG
in dark eyed individuals (Brown and Hazel) is
0:8:41, but only ):3:41 for light (blue and green)
individuals.
4.

| | | | | | |
|---|---|---|---|---|---|
| OCA2 | OCA2_8 | 217458 | 86326 | 13651545 | POLY |

217458 OCA2_8

| | | | |
|---|---|---|---|
| | CC | CT | TT |
| BRN | 2 | 14 | 13 |
| HAZL | 2 | 10 | 13 |
| GRN | 1 | 7 | 10 |
| BLUE | 3 | 14 | 24 |

JUSTIFICATION: The C allele is enriched in indivi-
duals of darker (brown and hazel) eye color rela-
tive to light. The ratio of CC:CT:TT genotypes in
the former group is 4:24:26 but only 4:21:34 in
the latter group.
5.

| | | | | | |
|---|---|---|---|---|---|
| OCA2 | OCA2_RS1800405 | 712061 | 21161 | 13651545 | POLY |

JUSTIFICATION: This SNP is part of the OCA3LOC920
haplotype system, the utility of which was demon-
strated in the text.
6.

| | | | | | |
|---|---|---|---|---|---|
| OCA2 | OCA2_RS1800414 | 712064 | 101492 | 13651545 | POLY |

712064 OCA2_RS1800414

| | | | |
|---|---|---|---|
| | AA | GA | GG |
| BRN | 26 | 1 | 0 |
| HAZL | 23 | 0 | 0 |
| GRN | 15 | 0 | 0 |
| BLUE | 40 | 0 | 0 |

JUSTIFICATION: Only individuals of brown eye color
carry the G allele, which appears to be quite
rare.
7.

| | | | | | |
|---|---|---|---|---|---|
| OCA2 | OCA2DBSNP_52401 | 712052 | 52401 | 13651545 | POLY |

712052 OCA2DBSNP_52401

| | | | |
|---|---|---|---|
| | AA | GA | GG |
| BRN | 17 | 15 | 1 |
| HAZL | 17 | 10 | 2 |
| GRN | 12 | 5 | 0 |
| BLUE | 28 | 14 | 2 |

JUSTIFICATION: The G allele is more frequently
found in individuals of darker (brown and hazel)
eye color than lighter eye color. The ratio of
AA:GA:GG genotypes in the dark group is 34:25:3,
but only 40:19:2 in the light group.
8.

| | | | | | |
|---|---|---|---|---|---|
| OCA2 | OCA2DBSNP_98488 | 712058 | 98488 | 13651545 | POLY |

712058 OCA2DBSNP_98488

| | | | |
|---|---|---|---|
| | AA | GA | GG |
| BRN | 0 | 8 | 14 |
| HAZL | 0 | 6 | 20 |
| GRN | 0 | 4 | 10 |
| BLUE | 1 | 3 | 37 |

JUSTIFICATION: The ratio of AA:GA:GG genotypes in
dark eyed individuals (brown and hazel) is
0:14:34, but 1:7:47 in lights showing that the A
allele is more frequent in the dark group. This
SNP is part of the OCA3LOC109 haplotype system
described in the text.
9.

| | | | | | |
|---|---|---|---|---|---|
| OCA2 | OCA2DBSNP_146405 | 712054 | 146405 | 13651545 | POLY |

712054 OCA2DBSNP_146405

| | | | |
|---|---|---|---|
| | AA | GA | GG |
| BRN | 12 | 12 | 7 |
| HAZL | 15 | 6 | 5 |
| GRN | 4 | 9 | 4 |
| BLUE | 15 | 22 | 2 |

JUSTIFICATION: The ratio of AA:GA:GG genotypes in
the dark (brown and hazel) group is 27:18:12 but
is 19:31:6 in the light group showing that the G
allele is more frequently found in the light eye
group.
10.

| | | | | | |
|---|---|---|---|---|---|
| OCA2 | OCA2DBSNP_8321 | 712057 | 8321 | 13651545 | POLY |

712057 OCA2DBSNP_8321

| | | | |
|---|---|---|---|
| | GG | GT | TT |
| BRN | 19 | 11 | 3 |
| HAZL | 16 | 13 | 0 |
| GRN | 14 | 3 | 0 |
| BLUE | 34 | 10 | 0 |

JUSTIFICATION: The GG:GT:TT genotype ratio in the
dark group is 35:24:3, but 48:13:0 showing that
the T allele is much more frequently found in the
dark group. This SNP is part of the OCA3LOC109
haplotype system described in the text of the
application.
11.

| | | | | | |
|---|---|---|---|---|---|
| OCA2 | OCA2E11_263 | 886895 | 26692 | 1365145 | POLY |

886895 OCA2E11_263

| | | | |
|---|---|---|---|
| | AA | AG | GG |
| BRN | 19 | 8 | 0 |
| HAZL | 23 | 7 | 0 |
| GRN | 11 | 4 | 0 |
| BLUE | 40 | 5 | 2 |

JUSTIFICATION: The ratio of AA:AG:GG genotypes in
the dark eye group is 42:15:0 and 51:9:2 in the
light group. Though this does not seem to be too
different, this SNP is part of the OCA3LOC109
haplotype system, the utility of which was
described in the text.
12.

| | | | | | |
|---|---|---|---|---|---|
| OCA2 | OCA2E11_350 | 886896 | 26779 | 1365145 | POLY |

886896 OCA2E11_350

| | | | |
|---|---|---|---|
| | AA | AG | GG |
| BRN | 6 | 20 | 2 |
| HAZL | 16 | 12 | 2 |
| GRN | 10 | 4 | 1 |
| BLUE | 31 | 13 | 3 |

JUSTIFICATION: The ratio of AA:AG:GG genotypes is
22:32:4 for dark hair individuals but only 41:17:4
for the light group. The frequency of the G allele
is therefore greater in the dark eye group. This
SNP is part of the OCA3LOC109 haplotype system,
the utility of which was demonstrated in the text.
13.

| | | | | | |
|---|---|---|---|---|---|
| OCA2 | OCA2E14_447 | 886894 | 95957 | 1365145 | POLY |

886894 OCA2E14_447

| | | | |
|---|---|---|---|
| | CC | CT | TT |
| BRN | 1 | 16 | 11 |
| HAZL | 2 | 13 | 16 |
| GRN | 0 | 5 | 10 |
| BLUE | 3 | 11 | 13 |

JUSTIFICATION: The ratio of CC:CT:TT genotypes in
dark eye individuals (brown and hazel) is 3:34:27
but only 3:11:13 in light eye individuals. The
frequency of the C allele is therefore greater in
the dark eye group (more heterozygotes relative to
TT homozygotes).
14.

| | | | | | |
|---|---|---|---|---|---|
| OCA2 | OCA2E16_300 | 886892 | 101644 | 1365145 | POLY |

886892 OCA2E16_300

| | | | |
|---|---|---|---|
| | GG | GC | CC |
| BRN | 28 | 0 | 0 |
| HAZL | 30 | 0 | 0 |
| GRN | 14 | 0 | 0 |
| BLUE | 43 | 0 | 1 |

JUSTIFICATION: The C allele is only found in
persons of blue eye color.
15.

| | | | | | |
|---|---|---|---|---|---|
| OCA2 | OCA2E10_102 | 886993 | 25083 | 1365145 | POLY |

886993 OCA2E10_102

| | | | |
|---|---|---|---|
| | AA | AG | GG |
| BRN | 0 | 7 | 13 |
| HAZL | 2 | 4 | 17 |
| GRN | 0 | 1 | 13 |
| BLUE | 0 | 6 | 33 |

JUSTIFICATON: The ratio of AA:AG:GG genotypes in
individuals of dark eye color is 2:11:30, but only
0:7:46 in persons of light eye color. Therefore
the frequency of the A allele is greater in
persons of darker eye color.
16.

| | | | | | |
|---|---|---|---|---|---|
| OCA2 | OCA2E10_549 | 886994 | 25519 | 1365145 | POLY |

886994 OCA2E10_549

| | | | |
|---|---|---|---|
| | CC | CA | AA |
| BRN | 0 | 11 | 16 |
| HAZL | 2 | 5 | 22 |
| GRN | 0 | 1 | 14 |
| BLUE | 0 | 8 | 37 |

JUSTIFICATION: The ratio of CC:CA:AA genotypes in
persons of darker eye color is 2:16:38 but only
0:9:51 in persons of lighter eye color. Therefore,
the C allele is more frequently found in persons
of darker eye color.
17.

| | | | | | |
|---|---|---|---|---|---|
| TYR | TYR_3 | 217468 | 656 | AP000720 | POLY |

217468 TYR_3

| | | | |
|---|---|---|---|
| | CC | CA | AA |
| BRN | 10 | 13 | 7 |
| HAZL | 14 | 9 | 2 |
| GRN | 3 | 12 | 2 |
| BLUE | 16 | 21 | 2 |

JUSTIFICATION: The ratio of CC:CA:AA genotypes is
24:21:9 in persons of darker eye color, but
19:33:4 in persons of lighter eye color. There-
fore, the frequency of the A allele is greater in
persons of lighter eye color.
18.

| | | | | | |
|---|---|---|---|---|---|
| TYR | TYRSNP_7 | 217472 | 37266 | AP000720 | POLY |
| 19. | | | | | |
| TYR | TYRSNP_8 | 217473 | 77771 | AP000720 | POLY |

217473 TYRSNP_8

| | | | |
|---|---|---|---|
| | AA | GA | GG |
| BRN | 0 | 18 | 20 |
| HAZL | 0 | 19 | 21 |
| GRN | 0 | 13 | 12 |
| BLUE | 0 | 33 | 29 |

JUSTIFICATION: The frequency of AA:GA:GG genotypes
in persons of dark eye color (brown and hazel) is
0:37:41, but 0:46:41 in persons of light eye
color. Thus, the frequency of the A allele is
slightly higher in persons of light eye color.
20.

| | | | | | |
|---|---|---|---|---|---|
| TYR | TYRE3_358 | 951497 | 37434 | AP000720 | POLY |

951497 TYRE3_358

| | | | |
|---|---|---|---|
| | AA | GA | GG |
| BRN | 0 | 6 | 21 |
| HAZL | 0 | 10 | 20 |
| GRN | 0 | 2 | 13 |
| BLUE | 2 | 3 | 41 |

JUSTIFICATION: The ratio of AA:GA:GG genotypes in
persons of darker eye color (brown and hazel) is
0:16:41 but 2:5:54 in persons of lighter eye
color. The heterozygous GA state is more frequent-
ly found in persons of darker eye color.
21.

| | | | | | |
|---|---|---|---|---|---|
| MC1R | MC1R_4 | 217438 | 442 | X67594 | POLY |

217438 MC1R_4

| | | | |
|---|---|---|---|
| | CC | CT | TT |
| BRN | 28 | 4 | 0 |
| HAZL | 26 | 2 | 0 |
| GRN | 16 | 1 | 0 |
| BLUE | 37 | 4 | 0 |

JUSTIFICATION: The ratio of CC:CT:TT genotypes in
persons of darker eye color is 54:6:0 and 53:5:0
in persons of lighter eye color, which is not
significantly different. However, this SNP is part
of the MCR3LOC105 haplotype system, the utility of
which was discussed in the text.
22.

| | | | | | |
|---|---|---|---|---|---|
| MC1R | MC1R_5 | 217439 | 619 | X67594 | POLY |

217439 MC1R_5

| | | | |
|---|---|---|---|
| | CC | CT | TT |
| BRN | 28 | 4 | 0 |
| HAZL | 24 | 4 | 0 |
| GRN | 16 | 0 | 0 |
| BLUE | 35 | 6 | 0 |

JUSTIFICATION: This SNP is part of the NCR3LOC105
haplotype system, the utility of which was dis-
cussed in the text.
23.

| | | | | | |
|---|---|---|---|---|---|
| MC1R | MC1R_6 | 217440 | 632 | X67594 | POLY |

JUSTIFICATION: This SNP is only found to be a
variant in African Americans, and absent in
Caucasians, and the former have darker mean
eye color than the latter.
24.

| | | | | | |
|---|---|---|---|---|---|
| MC1R | MC1R_7 | 217441 | 646 | X67594 | POLY |

217441 MC1R_5

| | | | |
|---|---|---|---|
| | CC | CT | TT |
| BRN | 27 | 4 | 0 |
| HAZL | 24 | 4 | 0 |
| GRN | 11 | 6 | 0 |
| BLUE | 36 | 5 | 0 |

JUSTIFICATION: This SNP is part of the MCR3LOC105
haplotype system, the utility of which was
described in the text.
25.

| | | | | | |
|---|---|---|---|---|---|
| MC1R | MC1R_14 | NULL | 1048 | X67594 | POLY |

JUSTIFICATION: This SNP is only found to be a
variant in African Americans, and absent in
Caucasians, and the former have darker mean
eye color than the latter.
26.

| | | | | | |
|---|---|---|---|---|---|
| MC1R | MC1R_15 | 217450 | 1272 | X67594 | POLY |

JUSTIFICATION: This SNP is only found to be a
variant in African Americans, and absent in
Caucasians, and the former have darker mean
eye color than the latter.
27.

| | | | | | |
|---|---|---|---|---|---|
| TYRP | TYRP_3 | 217485 | 21693 | AF001295 | POLY |

217485 TYRP_3

| | | | |
|---|---|---|---|
| | GG | GT | TT |
| BRN | 6 | 7 | 7 |
| HAZL | 1 | 11 | 9 |
| GRN | 1 | 5 | 4 |
| BLUE | 2 | 10 | 11 |

JUSTIFICATION: The ratio of GG:GT:TT genotypes is
7:18:16 in persons of darker eye color (brown and
hazel) but 3:15:15 in persons of lighter eye
color. The GG genotype is therefore more frequent-
ly found in persons of darker eye color.
28.

| | | | | | |
|---|---|---|---|---|---|
| TYRP | TYRP_4 | 217486 | 21970 | AF001295 | POLY |

217486 TYRP_4

| | | | |
|---|---|---|---|
| | AA | AT | TT |
| BRN | 4 | 12 | 6 |
| HAZL | 1 | 12 | 10 |
| GRN | 2 | 10 | 4 |
| BLUE | 0 | 16 | 18 |

JUSTIFICATION: The ratio of AA:AT:TT genotypes is
5:24:16 in persons of darker eye color (brown and
hazel) but 2:26:22 in person of lighter eye color.
Thus, the frequency of the A allele is greater in
persons of darker eye color.
29.

| | | | | | |
|---|---|---|---|---|---|
| TYRP | TYRP1_7 | 217489 | 22470 | AF001295 | POLY |

217489 TYRP_7

| | | | |
|---|---|---|---|
| | CC | CT | TT |
| BRN | 7 | 5 | 0 |
| HAZL | 6 | 0 | 0 |
| GRN | 2 | 2 | 2 |
| BLUE | 12 | 4 | 0 |

JUSTIFICATION: The ratio of CC:CT:TT genotypes in
persons of darker eye color (brown and hazel) is
13:5:0 but 14:6:2 in light eye persons. Thus, the
frequency of the T allele is greater in persons of
lighter eyes.
30.

| | | | | | |
|---|---|---|---|---|---|
| TYRP | TYRP1E1E2_357 | 869787 | 6824 | AF001295 | POLY |

JUSTIFICATION: This SNP is only found to be a
variant in African Americans, and absent in
Caucasians, and the former have darker mean
eye color than the latter.
31.

| | | | | | |
|---|---|---|---|---|---|
| TYRP | TYRP1E1E2-5_38 | 869743 | 5695 | AF001295 | POLY |

JUSTIFICATION: This SNP is only found to be a
variant in African Americans, and absent in
Caucasians, and the former have darker mean
eye color than the latter.
32.

| | | | | | |
|---|---|---|---|---|---|
| TYRP | TYRP1E1E2-5_307 | 869745 | 5964 | AF001295 | POLY |

JUSTIFICATION: This SNP is only found to be a
variant in African Americans, and absent in
Caucasians, and the former have darker mean
eye color than the latter.
33.

| | | | | | |
|---|---|---|---|---|---|
| TYRP | TYRP1E4_32 | 886933 | 10739 | AF001295 | POLY |

886933 TYRP1E4_32

| | | | |
|---|---|---|---|
| | CC | CT | TT |
| BRN | 0 | 2 | 26 |
| HAZL | 0 | 3 | 28 |
| GRN | 0 | 0 | 15 |
| BLUE | 0 | 2 | 45 |

JUSTIFICATION: The ratio of CC:CT:TT genotypes in
persons of darker eye color is 0:5:54 but 0:2:60
in lighter eye persons, demonstrating that the C
allele is slightly more frequent in persons of
darker eye color.
34.

| | | | | | |
|---|---|---|---|---|---|
| TYFF | TYRP1E4_499 | 886937 | 11204 | AF001295 | POLY |

886937 TYRP1E4_499

| | | | |
|---|---|---|---|
| | GG | GT | TT |
| BRN | 26 | 2 | 0 |
| HAZL | 27 | 4 | 0 |
| GRN | 12 | 3 | 0 |
| BLUE | 43 | 4 | 0 |

JUSTIFICATION: The ratio of GG:GT:TT genotypes in
persons of darker eye color is 53:6:0 but 55:7:0
in lighter eye persons. Though not significantly
different, this SNP is part of the TYR3L105
haplotype system, the utility of which was
described in the text.
35.

| | | | | | |
|---|---|---|---|---|---|
| TYRP | TYRP1E6_354 | 886938 | 17112 | AF001295 | POLY |

[0554] TABLE 9-2

| | | | FST P |
|---|---|---|---|
| GENE | DIVISION | HAPLOTYPE SYSTEM | VALUE |
| TYR | DARK + HAZ/LIGHT | TYR2LOC920 | P = 0.064 |
| OCA2 | DARK/LIGHT + HAZ | OCA3LOC109 | P < 0.001 |
| OCA2 | DARK/LIGHT + HAZ | OCA3LOC920 | P = 0.001 |
| TYRP | DARK/LIGHT + HAZ | TYRP3L05 | P = IINSIG |
| MC1R | DARK/LIGHT + HAZ | MCR3LOC106 | P = INSIG |

[0555] A lower P value indicates the haplotype system is especially useful for predicting eye color. INSIG means the P value was not statistically significant, but in the case of TYRP3L105 and MCR3LOC106 systems, it was close.

### EXAMPLE 10

### Further Analysis of Haplotypes

[0556] This example provides further analysis of the single haplotype systems discussed in Examples 8 and 9, and analysis of new combinations of these haplotypes using classification approaches other than the nested statistical approach. The data in Table 9-1 provides the relative value of each individual haplotype system for resolving individuals of the two main eye color classes (light=blue or green and dark=brown or black). These were the best haplotype systems that were identified in our analysis of Examples 8-9, within each of the four genes, as measured using the F-statistic P value for haplotypic differentiation between the two groups (DIVISION in Table 9-1), and as indicated by their contribution towards the best compound/complex genetic solution for human eye color (Table 8-8). For some genes, such as OCA2, we observed several other haplotype systems that are almost as good as that which contributes to the optimal solution (see Single Haplotype Systems below for the OCA3LOC908, OCA3LOC922 systems).

[0557] We used a classification tree generating software package to define rules for classifying individuals into the various eye color groups using these haplotype systems according to methods described herein (See Frudakis, Ser. No. 60/338,734, CLASSIFICATION TREE METHODS FOR CONSTRUCTING COMPLEX GENETICS CLASSIFIERS. Filed Dec. 3, 2001). The rules were generated for each of the haplotype systems alone—MCR3LOC105, OCA3LOC109, TYRP3L105 and TYR2LOC920, and are shown in Table 10-1.

[0558] From the analysis of the data, it is clear that classification rules made using each of the four haplotype systems lead to a reasonable classification success rate; each of these four haplotype systems has a success rate greater than 85% and the average is 87%. The best results were obtained from OCA3LOC109 and TYR2LOC920—the two haplotype systems with the lowest P values in Table 9-1. Although the average success rate of 87% seems good, it is probably not good enough for use in the field.

[0559] In order to improve this success rate (in ways other than the nested statistical approach we used to construct the optimal solution in Table 8-8), one can construct conditional rules from combinations of classification decisions derived from the four haplotype systems. Using the haplotype systems shown in Table 10-1, the classification from each of the four rule trees (one for each haplotype system) can be combined within one person. For example, one could classify individuals as dark eyed if at least 3 of the 4 classifications were dark, or if only 1 of 4 was dark etc. By using the latter rule (that only one dark classification is needed to classify a person as dark—which is consistent with genetic dominance suspected to play a role in human eye color inheritance), the conditional approach allows us to improve the accuracy of the solution to 88.5%. This is still far below the 96% the nested approach obtained.

TABLE 10-1
Classification success rates for the single-haplotype system classification rules
discussed in the text.

| | MCR3LOC105 | OCA3LOC109 | TYRP3L105 | TYR2LOC920 |
|---|---|---|---|---|
| CORRECT | 140 | 146 | 144 | 146 |
| INCORRECT | 25 | 19 | 21 | 19 |

### EXAMPLE 11

### Additional OCA2 Haplotypes Associated with Eye Color

[0560] This example provides additional haplotypes from the OCA2 gene that are associated with eye color. Methods for detecting the nucleotide occurrence at a SNP position are described in Example 4. The OCA3LOC908 haplotype system is comprised of markers 217452, 217455, and 217458 (See Table 1 for a description of the markers). Table 11-1 contains data on haplotype alleles and eye color for these haplotypes. Various statistical analyses are included below, that prove that the OCA3LOC908 haplotype system, and its constituent SNPs, are associated with (and possibly deterministic for) human eye color. Statistically significant P values are in bold print. The results of successful as well as unsuccessful tests are presented.

[0561] Statistical Analysis for OCA-Gene, Association Between Haplotyes & Eye Colors
[0562] Haplotypes: H1:CAT, H2:CAC, H3:CGC, H4:TGC, H5:TAT, H6:CGT
[0563] Eye Colors: Brown & Not Brown
[0564] HYPOTHESES: H0: Eye Colors are not Associated with specific Haplotypes.
[0565] H1: Eye Colors are Associated with specific Haplotypes.

[0566] Pearson's Chi-Square & Fisher's Exact Test were used to test H0.

TABLE 11-1

| | Haplotypes | | | | | | |
|---|---|---|---|---|---|---|---|
| Eye Color | H1: CAT | H2: CAC | H3: CGC | H4: TGC | H5: TAT | H6: CGT | Total |
| Brown | 35 | 8 | 9 | 6 | 2 | 0 | 60 |
| Not Brown | 94 | 17 | 22 | 0 | 0 | 1 | 134 |
| Total | 129 | 25 | 31 | 6 | 2 | 1 | 194 |

Results:
[0567] Pearson's chi-square test without Yates' continuity correction:
   Chi-square=19.2502, df=5, p-value=0.0017
[0568] Fisher's exact test p-value=0.0014, alternative hypothesis: two-sided
[0569] These tests lead to the Rejection of H0 in favor of H1.
[0570] To determine and quantify the Association between Haplotypes & Eye Colors the Adjusted Residuals (Rij) are worked out, where
   Rij=(nij−Mij)/{SQRT[Mij(1−Pi+)(1−P+j)]} & Mij=E(nij)
[0571] Rij follows N(0,1) as per Large Sample theory. In this case we have R11=−1.885, R21=1.885, R12=0.124, R22=−0.124, R13=−0.249, R23=0.249, R14=3.718, R24=−3.718, R15=2.124, R25=−2.124, R16=−0.670, R26=0.670
[0572] It is clear from the values of Adjusted Residuals that Haplotype H1:CAT is more associated with Not-Brown Eye Color than with Brown Eye Color,
[0573] Whereas Haplotypes H4:TGC & H5:TAT are Significantly & positively associated with Brown Eye Color.
[0574] Odds Ratio (OR) can also be used to infer the Association between Haplotypes & Eye Colors, by considering Haplotypes in pairs. If we consider Haplotypes H4 & H1 the sample OR for H4 for Brown (OR for H1 for Not-Brown)=34.61, CI (2.05,583.47)
[0575] In the case of H1 & H5, the OR for H5 for Brown=13.31,95% CI (0.62, 284.29)
[0576] In the case of H3 & H4, OR for H3 for Not-Brown=30.79, 95% CI (1.57, 603.05)
[0577] The sample OR also confirms that Haplotypes H4 & H5 are more associated with Brown Eye color & Haplotypes H1 & H3 are more associated with Not-Brown Eye Color.

[0578] Next effect of Mutations was next studied.

Site-1: Mutation

Mutation at site-1:
C <--> T H1: CAT <--> TAT: H5, H3: CGC <--> TGC:H4

[0579] Data regarding these mutations and their effect on eye color is shown in Table 11-2.
   Hypotheses:
[0580] H0: Mutation at site-1 has not contributed to variations in Eye colors.
[0581] H1: Mutation at site-1 has contributed to variations in Eye colors.
[0582] Let us consider Haplotypes H1 and H5.

[0583] We use Pearson's Chi-Square & Fisher's Exact Tests.

TABLE 11-2

Eye Color

| Haplotypes | Brown | Not Brown | Total |
|---|---|---|---|
| H1 | 35 | 94 | 129 |
| H5 | 2 | 0 | 2 |
| Total | 37 | 94 | 131 |

Results:
[0584] Pearson's Chi-square with out Yate's correction=5.1599,
[0585] P value=0.0231 and with Yate's correction=2.1908, P value=0.1388
[0586] Fisher's Exact test P-value=0.0782
[0587] Result: Significant at 10% level

[0588] Let us consider Haplotypes H3 & H4

TABLE 11-3

Eye Color

| Haplotypes | Brown | Not Brown | Total |
|---|---|---|---|
| H3 | 9 | 22 | 31 |
| H4 | 6 | 0 | 6 |
| Total | 15 | 22 | 37 |

Results:
[0589] Pearson's chi-square test with Yates' continuity correction,
   Chi-square value=7.7654, df=1, p-value=0.0053.
[0590] Fisher's exact test, p-value=0.0022, alternative hypothesis: two-sided
[0591] Result: Significant.
[0592] The Observations of Haplotypes H1 with H3 and H5 were pooled with H4 and the effect of Mutation at site-1 on Eye Color variations was studied.

[0593] Results of correlations between haplotype and eye color are shown in Table 11-4. Pearson's Chi-square & Fishers Exact tests were used to test H0.

TABLE 11-4

Eye Color

| Haplotypes | Brown | Not Brown | Total |
|---|---|---|---|
| H1 + H3 | 44 | 116 | 160 |
| H4 + H5 | 8 | 0 | 8 |
| Total | 52 | 116 | 168 |

Results:
[0594] Pearson's chi-square test with Yates' continuity correction
   Chi-square=15.4997, df=1, p-value=0.0001
[0595] Fisher's exact test, p-value=0.0001, alternative hypothesis: two-sided
[0596] Reject H0 at 0.01% Level in favor of H1 & Infer that Mutation at site-1 has produced Haplotypes which are strongly associated with Brown EYE Color.
[0597] We also computed the Sample Odds Ratio, after adding 0.5 to each cell, n22=0 & 95%
[0598] Confidence Interval (CI) to quantify the associations for Tables 3,4,5 considering H1 Vs H5 the sample OR for H5 for Brown (H1 for Not-Brown) OR=13.31, CI=(0.624, 284.291). Considering H3 Vs H4 the sample OR=30.789, CI=(1.737, 603.05). These OR values show that H5 &H4 are strongly associated with Brown Eye Color and H1 & H3 are strongly associated with Not-Brown Eye Color.
[0599] Considering (H1+H3) Vs (H4+H5)in table-5, the sample OR for (H4+H5)for Brown=44.506, CI: (2.517, 787.607).
[0600] This shows that Haplotypes (H1+H3) are strongly associated with Not Brown Eye Colors and Haplotypes (H4+H5) are strongly associated with Brown Eye Color.
[0601] We have also computed the Adjusted Residuals for the above table-5.
[0602] R11=−4.329, R12=4.329, R21=4.329 & R22=−4.329
[0603] As per Large sample theory Rij are distributed as N(0,1), the values of the Residuals clearly show that Haplotypes (H4+H5)are significantly Positively associated with Brown Eye Color and Haplotypes (H1+H5) are significantly & Positively associated with Not-Brown Eye Colors. Thus, mutation at site-1, has produced Significant variations in eye colors, through haplotypes H4 &H5. In other words the phenotypic variation in eye colors can be traced back to the mutation at site-1.
   Nested Contingency Analysis:
[0604] Association between haplotypes and eye colors (Brown vs. Not Brown):
[0605] According to Templeton et al. supra (1987) haplotypes form 0-step clades, haplotypes connected by single mutation constitutes the 1-step clades and haplotypes connected (including the inferred {.} ones) by 2 or less mutations constitute the -step clades and so on and carry out nested contingency analysis.

[0606] In this case there are six haplotypes:

H1:(CAT), H2:CAC), H3:(CGC), H4:(TGC), H5:(TAT),
H6:(GGT).

[0607] The following cladogram has been obtained by using PAUP version 4.0b8 software (Sinauer Associates, Inc. Publishers, Sunderland, Massachusetts. Downloadable from http://paup.csit.fsu.edu/index.html) with maximum parsimony as an optimality criterion.
[0608] 1-step clades are: I1:(H1, H5), I2:H2, I3:(H3, H4), I4:H6.
[0609] 2-step clades are:
[0610] Clade-1: (I1, I2)=(H1, H5, H2), Clade-2: (I3, I4)=(H3, H4, H6).
[0611] See FIG. 6 for diagram of 2 step lade.
[0612] Hypotheses: H0: Eye colors are not associated with various levels of clades. H1: Eye colors are associated with various levels of clades, which represents certain mutations.

[0613] We used Pearson's chi-square and Fisher's exact tests, to test H0, as shown in Table 11-5.

TABLE 11-5

| | Chi- | | | Fishers | |
|---|---|---|---|---|---|
| Source | Square | d.f | P-value | P-Value | Significance |
| With in 1-step | 2.1908 | 1 | 0.1388 | 0.0782 | <.10 |
| (H1 Vs H5) | | | | | |
| With in 1-step | 7.7654 | 1 | 0.0053 | 0.0022 | <.01 |
| (H3 Vs H4) | | | | | |
| With in 2-step | 0.1443 | 1 | 0.7041 | 0.7041 | NS |
| ((H1 + H5) Vs H2)) | | | | | |
| With in 2-step | 0.0000 | 1 | 1.0000 | 1.0000 | NS |
| ((H3 + H4) Vs H6)) | | | | | |
| Between 2-step | 1.6155 | 1 | 0.2037 | 0.2409 | NS |
| ((H1 + H2 + H5) Vs | | | | | |
| (H3 + H4 + H6)) | | | | | |

Note:
H1 Vs H5 and H3 vs. H4 represents mutations at site 1 and H1 + H2 + H5 vs. H3 + H4 + H6 represents mutation at site-2.

Inference:
[0614] Statistical Analysis shows that the mutation at site-1 is the source for significant variations in Eye Colors. In other words the variations in Eye Colors can be traced back to mutation in OCA2908 Gene at site-1.

[0615] Details of computations are provided below, based on the data shown Table 11-6 to 11-10:

TABLE 11-6
H1 vs. H5

| Within 1-step clade | Eye Color | | |
|---|---|---|---|
| Haplotypes | Brown | Not Brown | Total |
| H1 | 35 | 94 | 129 |
| H5 | 2 | 0 | 2 |
| Total | 37 | 94 | 131 |

Chi-square statistic value = 2,
P = value = 0 and Fisher's exact test,
P = value = 0.0782.

[0616] TABLE 11-7
H3 Vs H4

| Within 1-step clade | Eye Color | | |
|---|---|---|---|
| Haplotypes | Brown | Not Brown | Total |
| H3 | 9 | 22 | 31 |
| H4 | 6 | 0 | 6 |
| Total | 15 | 22 | 37 |

Chi-square statistic value = 7.7654,
P-value = 0.0053 and Fisher's exact test,
P-value = 0.0022.

[0617] TABLE 11-8
(H1 + H5) Vs H2

| Between 1-step clade | Eye Color | | |
|---|---|---|---|
| Haplotypes | Brown | Not Brown | Total |
| H1 + H5 | 37 | 94 | 131 |
| H2 | 8 | 17 | 25 |
| Total | 45 | 111 | 156 |

Chi-square statistic value = 0.1443,
P-value = 0.7041 and Fisher's exact test,
P-value = 0.8100

[0618] TABLE 11-9
(H3 + H4) Vs H6

| | |
|---|---|
| Between 1-step clade | Eye Color |

| Haplotypes | Brown | Not Brown | Total |
|---|---|---|---|
| H3 + H4 | 15 | 22 | 37 |
| H6 | 0 | 1 | 1 |
| Total | 15 | 23 | 38 |

Chi-square statistic value = 0.0000, P-value = 1.0000 and Fisher's exact test, P-value = 1.0000.

[0619] TABLE 11-10
(H1 + H2 + H5) vs. (H3 + H4 + H6)

| | |
|---|---|
| Between 2-step clades | Eye Color |

| Haplotypes | Brown | Not Brown | Total |
|---|---|---|---|
| H1 + H2 + H5 | 45 | 111 | 156 |
| H3 + H4 + H6 | 15 | 23 | 38 |
| Total | 60 | 134 | 194 |

Chi-square statistic value = 1.6155, P-value = 0.2037 and Fisher's exact test, P-value = 0.2409.

Single Haplotype System OCA3LOC908
[0620] The OCA3LOC922 haplotype system is comprised of markers 217455, 886993, and 217458 (See Table 1 for a description of the markers). What follows below are various statistical analyses that prove that the OCA3LOC922 haplotype system, and its constituent SNPs, are associated with (and possibly deterministic for) human eye color. Statistically significant P values are in bold print. The results of successful as well as unsuccessful tests are presented.
   Statistical Analysis for OCA3LOC922 Haplotype System
[0621] ASSOCIATION BETWEEN GENOTYPES AND EYE COLORS (Dark, Not-Dark) Hypotheses: H0: Eye Colors are not Associated with specific Genotypes. H1: Eye Colors are Associated with specific Genotypes.
[0622] We use Pearson's Chi-square & Fisher's exact tests to test H0.

[0623] Data on Genotype and eye color are shown in Table 11-11.

TABLE 11-11

Eye Color

| | | | |
|---|---|---|---|
| Genotypes | Dark | Not Dark | Total |

| | | | |
|---|---|---|---|
| G11: (H1,H1):(AGT,AGT) | 31 | 103 | 134 |
| G12: (H1,h2):(AGT,GAC) | 10 | 18 | 28 |
| G13: (H1,H3):(AGT,AGC) | 4 | 9 | 13 |
| G14: (H1,H4):(AGT,GGC) | 8 | 16 | 24 |
| G15: (H1,H5):(AGT,AAC) | 4 | 16 | 20 |
| G16: (H1,H6):(AGT,GAT) | 1 | 1 | 2 |
| G17: (H1,H7):(AGT,GGT) | 1 | 5 | 6 |
| G18: (H1,H8):(AGT,AAT) | 0 | 1 | 1 |
| G22: (H2,H2):(GAC,GAC) | 2 | 1 | 3 |
| G23: (H2,H3):(GAC,AGC) | 1 | 1 | 2 |
| G24: (H2,H4):(GAC,GGC) | 4 | 1 | 5 |
| G25: (H2,H5):(GAC,AAC) | 1 | 2 | 3 |
| G26: (H2,H6):(GAC,GAT) | 1 | 0 | 1 |
| G34: (H3,H4):(AGC,GGC) | 0 | 1 | 1 |
| G35: (H3,H5):(AGC,AAC) | 3 | 0 | 3 |
| G45: (H4,H5):(GGC,AAC) | 0 | 2 | 2 |
| G55: (H5,H5):(AAC,AAC) | 0 | 1 | 1 |
| Total | 71 | 178 | 249 |

Results:
[0624] Pearson's chi-square test without Yates' continuity correction:
   Chi-square=25.6524, df=16, p-value=0.0591
[0625] These results are not significant at a 5% level of Significance. However at a 10% level of significance the Results are significant. At this level the data show that specific association between Eye colors and Genotypes exists. To determine and quantify the association we computed the Odds Ratio (OR) & 95% Confidence Interval (CI) by considering two Genotypes at a time.
[0626] Considering the Genotypes G11 & G 12, OR for G11 for Not Dark Eye colors=OR for G12 for Dark Eye colors=1.846 CI=(0.772, 4.410).
[0627] In the case of G11, G22 OR for G22 for Dark Eye=6.645 CI=(0.583, 75.77)
[0628] In the case of G11, G24 OR for G24 for dark Eye=13.29 CI=(1.432, 123.32)
[0629] We also computed the Adjusted Residuals (AR) Rij, which follow SND N(0,1)to quantify the associations. Presented below are a few ARs of interest. R11=−2.0297, R12=2.0297, R91=1.473, R92=−1.473, R111=2.576 & R112=−2.576.
[0630] The values of OR & AR clearly reveal that Genotype G11:(AGT,AGT) more significantly associated with Not-Dark Eye colors, than with Dark eye colors.
[0631] Genotypes G12:(AGT,GAC), G22:(GAC,GAC) & G24:(GAC,GGC) are strongly associated with Dark Eye colors than with Not-dark eye colors.
[0632] Next we examined the Haplotypes, individually, as to whether they are associated with Eye colors
[0633] STATISTICAL ANALYSIS for OCA3LOC922 Gene Association between Haplotypes & Eye Colors.
[0634] The haplotypes analyzed included:
[0635] H1:AGT, H2:GAC, H3:AGC, H4:GGC, H5:AAC, H6:GAT, H7:GGT & H8:AAT.
[0636] Eye Colors scored included: dark (Brown, Brown, Brown2, Brown3, and Black) and “Not-Dark” (Green, Blue, Hazel).
   Hypotheses:
[0637] H0: Eye colors are not associated with specific Haplotypes.
[0638] H1 Eye Colors are associated with specific Haplotypes.
[0639] Pearson's Chi-square test was used to test H0.

[0640] In the methods used, if a test showed significance, the sample Odds Ratio was computed along with 95% Confidence Internal (CI) by considering two Haplotypes at a time. Also Computed were the Adjusted Residuals, Rij which are distributed as Standard Normal Deviates as per Large sample theory, to determine and quantify the association between Haplotypes and Eye colors. Data on eye color and haplotype are shown in Table 11-12.

TABLE 11-12

Eye color

| Haplotypes | Dark | Not Dark | Total |
|---|---|---|---|
| H1:AGT | 90 | 272 | 362 |
| H2:GAC | 21 | 24 | 45 |
| H3:AGC | 8 | 11 | 19 |
| H4:GGC | 12 | 20 | 32 |
| H5:AAC | 8 | 22 | 30 |
| H6:GAT | 2 | 1 | 3 |
| H7:GGT | 1 | 5 | 6 |
| H8:AAT | 0 | 1 | 1 |
| Total | 142 | 356 | 498 |

Results:
[0641] The Pearson's chi-square test without Yates' continuity correction yielded significant results:
   Chi-square=15.6375, df=7, p-value=0.0286
[0642] Therefore, H0 is rejected in favor of H1 and infer that Eye colors are associated with specific Haplotypes.
[0643] Considering H1 & H2, the Odds Ratio (OR) for H1 Not-Dark Eye colors=OR for H2 for Dark Eye colors & CI are: OR=2.664, CI=(1.405,4.976)
[0644] Considering H1 & H3 OR for H3 for Dark Eye colors=2.198, CI=(0.857,5.634)
[0645] Considering H1 & H4 OR for H4 for Dark Eye Colors=1.813, CI=(0.853,3.855)
[0646] Adjusted Residuals: R11=−2.945, R12=2.945, R21=2.828, R22=−2.828, R31=1.338, R32=−1.338, R41=−1.164, R42=1.164, R51=−0.231, R52=0.231, R61=1.468, R62=−1.468, R71=−0.647, R72=0.647, R81=−0.632, R82=0.632,
[0647] The values of OR along with CI and the values of Adjusted Residuals Clearly show that Haplotypes H1:AGT is significantly and positively associated with Not-Dark Eye colors, whereas haplotypes H2, H3 & H4 are more strongly associated with Dark Eye colors than Not-Dark Eye colors.
[0648] Next we studied whether any mutations are responsible for this associations, by carrying out nested contingency analysis.
   Statistical Analysis OCA3LOC922: Nested Contingency Analysis
[0649] We studied the association between OCA3LOC922 haplotypes and eye colors (Dark vs. Not-dark). According to Templeton et al., supra (1987) haplotypes form 0-step clades, haplotypes connected by single mutation constitutes the 1-step clades and haplotypes connected (including the inferred {.} ones) by 2 or less mutations constitutes the 2-step clades and so on and carry out nested contingency analysis.
[0650] Eye Colors analyzed included: Dark (Brown, Brown, Brown2, Brown3 and Black) and Not-Dark (Blue, Green, Hazel).
[0651] For OCA3LOC922 there are eight haplotypes{0-step Clades}:
[0652] H1:AGT, H2:GAC, H3:AGC, H4:GGC, H5:AAC, H6:GAT, H7:GGT, H8:AAT
[0653] The following cladogram has been obtained:
[0654] 1-step clades: I1:(H5, H8), I2:(H7, H1), I3:(H3, H4), I4:(H2, H6).
[0655] 2-step clades are:
[0656] Clade-1: {I1, I2}={(H5, H8), (H7, H1)}, Clade-2: {I3, I4}={(H3, H4), (H2, H6)}.
[0657] See FIG. 7 for 2-step cladogram: Clade-1 Clade-2.
[0658] The hypotheses tested included the following:
[0659] H0: Eye colors are not associated with various levels of clades.
[0660] H1: Eye colors are associated with various levels of clades, which represents certain mutations.
[0661] Pearson's chi-square and Fisher's exact tests were used to test H0.

[0662] Results of nested contingency analysis for Brown vs. not-brown eye colors are presented in Table 11-13:

TABLE 11-13

| | | | | | P-Value |
|---|---|---|---|---|---|
| Source | Chi-Square | d.f | P-value | Fisher's | Significance |
| NS | Within 1-step | 0.3159 | 1 | 0.5741 | 1.0000 |
| | Clades | | | | |
| | (H5 vs. H8) | | | | |
| NS | (H1 vs. H7) | 0.0002 | 1 | 0.9876 | — |
| NS | (h2 vs. h6) | 0.0056 | 1 | 0.9405 | 0.6011 |
| NS | (h3 vs. h4) | 0.0008 | 1 | 0.9768 | 0.7743 |
| NS | Within 2-step | 0.0069 | 1 | 0.9338 | — |
| | Clades | | | | |
| | {(H1 + H7) vs. | | | | |
| | (H5 + H8)} | | | | |
| NS | {(H3 + H4) vs. | 0.4219 | 1 | 0.5028 | 0.4219 |
| | (H2 + H6)} | | | | |
| <.01 | Between 2-step | 12.5967 | 1 | 0.0004 | — |
| | Clades | | | | |
| | {(H1 + H7 + | | | | |
| | H5 + H8) vs. | | | | |
| | (H3 + H4 + | | | | |
| | H2 + H6)} | | | | |

Note:
{(H1 + H7 + H5 + H8) Vs (H3 + H4 + H2 + H6)} represents mutation at site 3, which has resulted in significant variations in Eye colors.

Details of Analysis between Two Level Clades:
[0663] The hypothesis tested included:
[0664] H0: There is no association between two level clades and Eye colors.
[0665] H1: The Two level Clades are associated with specific eye colors.

[0666] Data for this analysis of eye color and 2-step clades are shown in 11-14.

TABLE 11-14

Eye Color

| Two step Clades | Brown | Not Brown | Total |
|---|---|---|---|
| Clade-2 | 43 | 56 | 99 |
| H2 + H3 + H4 + H6 | | | |
| Clade-1 | 99 | 300 | 399 |
| H1 + H5 + H7 + H8 | | | |

Results
[0667] Pearson's chi-square test with Yates' continuity correction yielded the following values:
   Chi-square=12.5967, df=1, p-value=0.0004
[0668] Hypothesis Ho was rejected and an inference was made that the Two-Step Clades are associated with specific Eye colors.
[0669] To quantify the association the Odds Ratio (OR) was computed along with 95% Confidence Interval (CI) and the Adjusted Residuals {Rij}, which follow N(0,1) as per large sample theory.
[0670] OR for (H2+H3+H4+H6) for Dark eye colors=2.327, CI=(1.478, 3.693), R11=3.674=R22
[0671] OR for (H1+H5+H7+H8) for Not-Dark Eye=2.327, CI=(1.478, 3.693), R21=−3.674=R12
[0672] The values of OR and Adjusted Residuals clearly show that haplotypes H2, H3, H4, & H6 are significantly positively associated with Dark Eye colors, and Haplotypes H1, H5, H7 & H8 are significantly and positively associated with Not-Dark Eye colors. The mutation at site-3 is responsible for this association. In other words the variations in eye colors can be traced back to the mutation at site-3.
   Statistical Analysis for OCA3LOC922 Eye Color: Association between Genotypes and Eye Colors
[0673] The hypothesis tested in this analysis included the following:
[0674] H0: There is no association between genotypes and eye colors.
[0675] H1: There is an association between genotypes and eye colors.

[0676] Chi-square and Fisher's exact test's P-value were calculated. Data on Genotype and eye color for this analysis is presented in Table 11-15. Data was calculated in terms of light (blue+green) and not-light (brown+dark+hazel) eye color.

TABLE 11-15

Eye Color

| | | | |
|---|---|---|---|
| Genotype | Light | Not Light | Total |

| | | | |
|---|---|---|---|
| G11: (H1,H1):(AGT,AGT) | 67 | 67 | 134 |
| G12: (H1,H2:(AGT,GAC) | 11 | 17 | 28 |
| G13: (H1,H3):(AGC,AGT) | 3 | 10 | 13 |
| G14: (H1,H4):(AGT,GGC) | 12 | 12 | 24 |
| G15: (H1,H5):(AGT,AGT) | 12 | 8 | 20 |
| G16: (H1,H6):(AGT,GAT) | 1 | 1 | 2 |
| G17: (H1,H7):(AGT,GGT) | 5 | 1 | 6 |
| G18: (H1,H8):(AAT,AGT) | 0 | 1 | 1 |
| G22: (H2,H2):(GAC,GAC) | 0 | 3 | 3 |
| G23: (H2,H3):(AGC,GAC) | 0 | 2 | 2 |
| G24: (H2,H4):(GAC,GGC) | 0 | 5 | 5 |
| G25: (H2,H5):(AAC,GAC) | 1 | 2 | 3 |
| G26: (H2,H6):(GAC,GAT) | 0 | 1 | 1 |
| G34: (H3,H4):(AGC,CGC) | 1 | 0 | 1 |
| G35: (H3,H5):(AAC,AGC) | 0 | 3 | 3 |
| G45: (H4,H5):(AAC,GGC) | 1 | 1 | 2 |
| G55: (H5,H5):(AAC,AAC) | 0 | 1 | 1 |
| Total | | | |

[0677] Result: Chi-square Statistic values (24.2564, d.f.=16 and P-value=0.0841) were not significant.
[0678] Inference: There was no significant difference between genotypes and eye colors at a 5% level.
   Association between Haplotypes and Eye Colors Light (Blue+Green) and Not-Light (Brown+Dark+Hazel).
[0679] The hypothesis tested in this analysis included the following:
[0680] H0: There is no association between haplotypes and eye colors.
[0681] H1: There is an association between haplotypes and eye colors.

[0682] Chi-square and Fisher's exact test's P-value were calculated. Data of geneotype and eye color are shown in Table 11-16.

TABLE 11-16

Eye Color

| | | | |
|---|---|---|---|
| Genotype | Light | Not Light | Total |

| | | | |
|---|---|---|---|
| H1: AGT | 178 | 184 | 362 |
| H2: GAC | 12 | 33 | 45 |
| H3: AGC | 14 | 15 | 19 |
| H4: GGC | 14 | 18 | 32 |
| H5: AAC | 14 | 16 | 30 |
| H6: GAT | 1 | 2 | 3 |
| H7: GGT | 5 | 1 | 6 |
| H8: AAT | 0 | 1 | 1 |
| Total | 228 | 270 | 498 |

[0683] Result: The results for this analysis were significant (Chi-square Statistic value=17.4834, d.f.=7 and P-value=0.0145). The haplotypes were found to be associated with specific eye colors.

TABLE 11-17

| | Fisher's | | | | |
|---|---|---|---|---|---|
| | Odds | | | | |
| Haplotype | Pair | | | P-value | |
| Chi-Square | (Hi, Hj) S | d.f. | P-value | Hi fo [symbol] | 95% C.I. |
| (H1, H2) | 8.1441 | 1 | 0.0043 | 0.00432.6603 | [1.3316, 5.31 |
| (H1, H3) | 4.6492 | 1 | 0.0311 | 0.01853.6277 | [1.1813, 11.1 |
| (H2, H7) | 5.3125 | 1 | 0.0212 | 0.01240.0727 | [0.0077, 0.68 |

Nested Contingency Analysis between Haplotypes and Eye Colors
[0684] Haplotypes form 0-step clades, haplotypes connected by single mutation constitutes 1-step clades and haplotypes connected by 2 or less mutations constitute 2-step clades and so on for carrying out nested analysis (Templeton et al., 1987).
[0685] In this case, we have eight haplotypes and they form 0-step clades which are given below:
[0686] 0-step clades: H1:AGT, H2:GAC, H3:AGC, H4:GGC, H5:AAC, H6:GAT, H7: GGT and H8:AAT.
[0687] The following two clades were obtained by using PAUP Ver. 4.0b8 software.
[0688] 1-step clades: I-1:(H5, H8), I-2:(H7, H1), I-3:(H3, H4), I-4:(H2, H6)
[0689] 2-step clades: II-1:(I1, I2)=(H8, H8, H7, H1), II-2:(I3, I4)=(H3, H4, H2, H6)
[0690] See FIG. 8 for 2-step cladogram: Clade-1 Clade-2.
[0691] The hypotheses that were tested included:
[0692] H0: Eye colors are not associated with various steps of clades.
[0693] H1: Eye colors are associated with various steps of clades.
[0694] Test Statistic: Chi-square test and Fisher's exact test P-value were determined.

[0695] The nested contingency analysis for blue vs green eye colors is shown in Table 1-18:

TABLE 11-18

| | | | | Fisher's | |
|---|---|---|---|---|---|
| Source | Chi-square | d.f. | P-value | P-value | Significance |
| Within 1-step | | | | | |
| (H5 vs H8) | 0.0000 | 1 | 1.0000 | 1.0000 | Not-significant |
| (H1 vs H7) | 1.5582 | 1 | 0.2119 | 0.1204 | Not-significant |
| (H2 vs H6) | 0.0000 | 1 | 1.0000 | 1.0000 | Not-significant |
| (H3 vs H4) | 1.7872 | 1 | 0.1819 | 0.1350 | Not-significant |
| Within 2-step | | | | | |
| ((H1 + H7) vs | 0.4210 | 1 | 0.5165 | 0.5824 | Not-significant |
| (H5 + H8)) | | | | | |
| ((H3 + H4) vs | 0.7751 | 1 | 0.3787 | 0.3959 | Not-significant |
| (H2 + H6)) | | | | | |
| Between 2-step | | | | | |
| ((H1 + H5 + | 10.4229 | 1 | 0.0012 | 0.0015 | <0.001 |
| H7 + H8) vs | | | | | |
| (H2 + H3 + | | | | | |
| H4 + H6)) | | | | | |

[0696] Result: The results of this analysis indicated that two level clades are associated with eye colors (Table 11-19). Odds ratio for (H1+H5+H7+H8) for light eye color=Odds ratio for (H2+H3+H4+H6) for not-light eye color is 2.1398 and 95% C.I. is [1.3399, 3.4156].

TABLE 11-19

| | | | | Fisher's | |
|---|---|---|---|---|---|
| | Chi- | | P- | P- | |
| Source | square | d.f. | value | value | Significance |
| Within 1-step | 0.0000 | 1 | 1.0000 | 1.0000 | Not significant |
| (H5 vs. H8) | | | | | |
| (H1 vs. H7) | 1.5582 | 1 | 0.2119 | 0.1204 | Not significant |
| (H2 vs. H6) | 0.0000 | 1 | 1.0000 | 1.0000 | Not significant |
| (H3 vs. H4) | 1.7872 | 1 | 0.1819 | 0.1350 | Not significant |
| Within 2-step | 0.4210 | 1 | 0.5165 | 0.5824 | Not significant |
| ((H1 + H7) vs. | | | | | |
| (H5 + H8)) | | | | | |
| ((H3 + H4) vs. | 0.7751 | 1 | 0.3787 | 0.3959 | Not significant |
| (H2 + H6)) | | | | | |
| Between 2-step | 10.4229 | 1 | 0.0012 | 0.0015 | <0.001 |
| ((H1 + H5 + H7 + H8) | | | | | |
| vs. | | | | | |
| (H2 + H3 + H4 + H6)) | | | | | |

### EXAMPLE 12

### Classification Tree Algorithm

[0697] This Example presents a classification tree algorithm used for solution development. Classification trees are used to predict membership of dependent/response variables from one or more independent/predictor variables in a set of data. Classification trees are mainly used in data mining. Classification trees present results in the from of trees. Every basic tree structure has a root, decision nodes, leafs and edges. Classification trees are built by asking a serious of questions and a decision is taken depending on the answer to that question, the final answer depends on all the previous answers.

[0698] The root of the tree is the starting point of the tree, it asks the first question. Each decision node asks a question and depending on the answer the tree keeps growing (goes to the next decision node) or terminates with a leaf node which gives the final answer. The edges connect the root to the nodes and leafs.

[0699] In classification trees the value at the leaf is categorical (NOT NUMBERS)

[0700] In regression trees the value at the leaf is numeric.

[0701] The following are important in building the trees.
[0702] 1. What attribute to select at a particular decision node.
[0703] 2. What value should be selected as threshold for the attribute, in order to split the tree and continue growing.
[0704] 3. What is the stopping criterion.
   C4.5 Tree Construction Algorithm

[0705] The tree is empty initially and the algorithm starts building it from the root and adds decision nodes or leaf nodes as it goes down each branch of the tree. The following steps are carried out recursively.
[0706] 1. Calculating the information gain of each attribute.
[0707] 2. The attribute with the highest information gain is selected for test at the node.
[0708] 3. If the attribute selected is discrete, node is branched with all possible values. If the attribute is continuous, a cut point is selected that yields highest information gain. The cut-point splits the node into two sets: those with the value less than or equal to the cut point and those with value greater than the cut point.
[0709] 4. Assigning the data items into corresponding branches.
[0710] 5. Repeating all the above steps in each branch of the tree.
   This recursive method is a greedy approach, as the algorithm never backtracks to reconsider previous decision to modify the learnt tree. The algorithm stops when a stopping criterion is met. The C4.5 grows a large tree and the over fitting problem is solved at the pruning stage, we can see that the following four elements form the core of C4.5 tree building algorithm:
   Choosing the Attribute for the Decision Node

[0711] The central choice in building a tree is selecting which attribute to test at each node in the tree. The selected attribute must be most useful for classifying dataset. C4.5 uses either information gain or information gain ratio. The information gained by partitioning training set T using the test X is defined as the following:

$$gain ( X ) = info ( T ) - {info}_{x} ( T ) , \\ {info}_{x} ( T ) = {\sum }_{i = 1}^{n} \frac{\vert {T}_{i} \vert}{\vert T \vert} \times info ( T ) , \\ info ( T ) = - {\sum }_{j = 1}^{k} \frac{freq ( {C}_{j} , T )}{\vert T \vert} \times {log}_{2} ( \frac{freq ( {C}_{j} , T )}{\vert T \vert} ) bits ,$$

Where info(T) is the average amount of information needed to identify the class of an example in T. info_{X}(T) is the expected information requirement after T is partitioned into n subsets {Ti} in accordance with the outcomes of the test X;
Information gain criterion has a strong bias in favor of tests with many outcomes, so C4.5 uses gain ratio as a default split criterion, the gain ratio is defined as

$$gain ratio ( X ) = \frac{gain ( X )}{split info ( X )} , \\ split info ( X ) = - {\sum }_{i = 1}^{n} \frac{\vert {T}_{i} \vert}{\vert T \vert} \times {log}_{2} ( \frac{\vert {T}_{i} \vert}{\vert T \vert} ) ,$$

[0712] where split info(X), is the potential information generated by splitting T into n subsets.

Notations

| Symbol | Description |
|---|---|
| T | Training data set |
| X | Test formed using attribute A |
| Freq (Cⱼ, T) | Number of cases in T that belongs to class Cⱼ |
| K | Number of classes in data set T |

Choosing the Threshold Value for the Split

[0713] Once the attribute is selected a value of the attribute should be assigned to the node. For discrete attribute A, node is branched with all possible values. For continues attribute A, a binary test with outcomes A≦Γ and A>Γis done. The best threshold Γ is found for an attribute A by: first, sorting the training examples and thresholds are selected buy finding the mid points of two adjacent values in the sorted list. The threshold that yields the best value of the splitting criterion is then selected.

Stop Splitting Condition and Class Assignment

[0714] The C4.5 stops splitting if all the cases at the node belong to the same class Cⱼ, the node becomes a leaf node with associated class Cⱼ. If number of cases at the node is less than minimum required and cases belong to more than on one class, the node becomes a leaf node with associated class Cⱼ (the most frequent class). The classification error of the leaf is the number of cases in T whose class is not Cⱼ.

[0715] From Trees to rules.
[0716] 1. Every path from the root of a tree to a leaf gives one initial rule
[0717] 2. Each rule is simplified by removing conditions that does not help in discriminating the predicted class.
[0718] 3. Rules that do not contribute to accuracy is removed
[0719] 4. The sets of rules for the classes are then ordered to minimize misclassification rates and a default class is chosen.

### EXAMPLE 13

### Correspondence Analysis for Complex Genetic Analysis

[0720] The following example discusses correspondence analysis for complex genetic analysis. Correspondence Analysis is a powerful multivariate graphical procedure to study the association between variables and attributes, and can be considered a scaling method linked to principal component analysis and canonical correlation analysis (Kishino and Waddel, Genome Informatics 11:83-95, 2000; Benzecri, in “Correspondence Analysis Handbook” (Dekker, New York 1992); Benzecri, in “L'Analyse des donnees” Vol. 2: L'Analyse des Correspondence (Dunod, Paris 1973); Greenacre, in “Theory and Application of Correspondence Analyses” (London, Academic Press 1984), each of which is incorporated herein by reference). Values and attributes are represented within a contingency table of “i” rows (the observed haplotype pairs for the TYR2LOC920, OCA3LOC920, MCR3LOC105, OCA3LOC109 and TYRP3L106 haplotype systems) and “j” columns (eye color classes). From this table, an orthogonal system of axes is constructed through Principal Components, where row and column attributes are jointly displayed in a k dimensional space, preserving the distance between the row (i) attributes and the distance between the column (j) attributes, where k=min{i−1, j−1}, is preserved. Two row points that are close to each other in the k dimensional space indicate that the two rows have similar profiles (conditional distributions) across the columns. Similarly two column points close to one another in the space indicate that the column attributes share similar profiles (conditional distributions) down the rows.

[0721] As disclosed herein, proximity between row and column points indicated that particular row-column (haplotype pair, eye color) combinations occurred more frequently than would have been expected based on the assumption of independence, and thereby indicated a strong association between the row (haplotype pairs) and column (eye color) attributes. The usual output from correspondence analysis includes the “best” two-dimensional representation of the data with the coordinates of the plotted points (i, row points; j, column points) along with a measure (called the inertia) of the amount of information retained in each dimension. Multidimensional space is represented with multiple two-dimensional plots. The display coordinates x_{i&}^{(g)}, g (genotype or haplotype system) (i=1, 2, . . . n_{g}) and eye color xⱼ^{(c)} (j=1, 2, . . . n_{c}) were obtained by minimizing:

$$L = {\sum }^{{n}_{g}} {\sum }^{{n}_{e}} {{f}_{ij} [ {x}_{i}^{( g )} - {x}_{j}^{( c )} ]}^{2} \qquad ( 1 )$$

under the constraints that the mean coordinates are zero with variance=1, and where f_{ig} is ≧0. The cost function (1) relates genotypes (haplotypes) to eye color in a more direct way than the classification tree method.

[0722] The classification tree analysis was limited by its own complexity, which caused the sample size within certain compound genotype classes to be low. Because of the statistical limitations of the classification tree approach, a Correspondence Analysis was applied to study the association between genotypes and eye colors. Correspondence analysis is primarily a graphical technique designed to represent complex associations in a low-dimensional space. Eigenvalues of the 3 (traits minus 1)×49 (haplotype pairs) contingency table were used to collapse the data into three dimensions represented by the scatter plots of genotypes (diploid haplotype pairs) and trait values (eye colors).

[0723] Good scatter of genotypes and trait values was observed in all three dimensions. Dimensions 1 and 2 combined to explain 86.5% of the genotypic and phenotypic variation, whereas dimensions 1+3 and 2+3 combined to explain 72.5%, and 41% of the variation, respectively. Aside from explaining the variance in eye color contributed by genotypes of these haplotype systems, the plot of row and column attributes within the k-dimensional space allows for the construction of a graphical classifier that is less sensitive to compound genotype class sizes. In this case, the genetic attributes for haplotype phase-certain individuals of known but concealed eye color were identified and plotted. Connecting the within-individual attributes to one another with edges creates a k-dimensional object, the moment of which is offset from the j column attribute (eye color class) coordinates by j Euclidian distances. The likelihood that the individual falls within each class was inferred from these Euclidian distances and used to formulate a prediction that is compared against the actual eye color. This technique allowed the correct classification of 97% of Caucasian individuals tested as belonging to a particular eye color shade (n=254; Light=Blue, Green; Dark=Brown, Hazel). In contrast to the classification tree method, where the particular eye color was almost never predictable, the correspondence analysis allowed for the correct prediction of specific eye color 45% of the time. Whereas the classification tree method could not be applied to 14% of Caucasians, only 4% of Caucasians tested were inconclusive using the Correspondence Analysis method.

[0724] These results demonstrate that correspondence analysis provides a means to perform complex genetic analyses such as an analysis of eye color. As such, correspondence analysis can be used to identify genetic risk factors associated such as a predisposition to cataracts or melanoma or the like with a complex genetic trait such as eye color, skin pigmentation, or hair color. For example, persons with a haplotype associated with a certain light eye color can be compared to persons with a haplotype associated with a different light eye color to determine whether there is a correlation with incidence of melanoma. The identification of specific haplotypes as predictive markers for a disease such as melanoma also provides a means to develop targets for drugs that can modulate the susceptibility to a disorder of an individual having a haplotype associated with the disorder.

### EXAMPLE 14

### Genetic Classifier for Racial Inference

[0725] The following example presents a genetic classifier for SNP-based racial inference. DNA based human identity testing is dependent on accurate and impartial determinations of racial and/or ethnic affiliation. STR markers have been described to be capable of racial classification, but the multi-allelic nature of STRs impose unique statistical and technical problems. In an effort to identify bi-allelic markers that could be used to infer racial affiliation from DNA, common single nucleotide polymorphisms were surveyed in the human pigmentation and xenobiotic metabolism genes. Sixty SNPs were identified, as discussed in further detail in this Example, with significant minor allele frequency differences between groups of unrelated Asians, African Americans and Caucasians (n=230), and used both linear and quadratic methods to incorporate these SNPs into a classifier model. Generalization of a quadratic model revealed perfect accuracy and sensitivity in a group of 505 unrelated individuals (403 Caucasians, 114 African Americans and 15 Asians). These results indicate that the human pigmentation and xenobiotic metabolism genes are an unusually rich source for racially informative SNPs, and suggest that powerful systematic genetic forces that have shaped the distribution of these gene sequences throughout human evolution. The racial classifier disclosed herein has the potential to expand the utility of forensic DNA identity testing by offering a novel method for qualifying reference population databases used for calculating exclusion probabilities, as well by ascribing physical characteristics to anonymous DNA samples.

Methods

Data Collection

[0726] Specimens and basic biographical data were obtained from randomly selected individuals of self-reported African, Asian and Caucasian descent within the state of Florida, under informed consent guidelines (each participant approved of the use of their specimen for forensic DNA research with the aims outlined in this manuscript). We extracted DNA from circulating lymphocytes using commercial (Qiagen and Promega) preparation kits, and used a novel nested PCR approach to front-end a primer extension protocol employing a 25K SNPstream genotyping system (Orchid BioSciences; Princeton N.J.).

Resequencing

[0727] Vertical resequencing for the various genes was performed by amplifying gene sequences from a multiethnic panel of 670 unrelated individuals for whom only race was known. For each gene used in our study, we amplified the proximal promoter, each of the exons with flanking intron, and 3′ UTR. PCR amplification was accomplished using pfu Turbo, according to the manufacture's guidelines (Stratagene). We developed a program to design re-sequencing primers to insure that only the region of interest was amplified, and no cross-over from pseudo genes or other homologous genes would occur. This was accomplished by analyzing the sequence file of interest in tandem with all other flat-files identified through BLAST searches to have homology with this sequence. The program also insured that the maximum number of relevant regions were included in the fewest possible number of amplicons. Amplification products were subcloned into the pTOPO (Invitrogen) sequencing vector. 96 insert positive colonies were grown and Plasmid DNA was isolated and sequenced using PE Applied Biosystems BDT chemistry and an ABI3700 sequencer. Sequences were deposited into a commercial relational database system (iFINCH, Geospiza, Seattle, Wash.). The resulting sequences were aligned and analyzed using another program developed to align sequences (using Clustal X) within each amplification region, identify discrepancies between these sequences, and qualify the discrepancies as candidate SNPs using PHRED quality metrics.

Genotyping

[0728] A first round of PCR was performed on these samples using the high-fidelity DNA polymerase pfu turbo. Because the primers for this step were the same primers that were used for resequencing, they were known to not cross-react with other competing sequences in the genome. The resulting PCR products were checked on an agarose gel, diluted, and then used as template for a second round of PCR incorporating phosphothionated primers. We observed a higher specificity when using this nested genotyping approach than when using a single amplification protocol, presumably because most of the genes we targeted were members of multi-gene families and because of BLAST algorithm deficiencies and public sequence database limitations (incompleteness). Genotyping was performed on individual DNA specimens using a single base primer extension protocol and an Orchid SNPstream 25K platform (Orchid BioSciences, Inc., Princeton, N.J.).

Results

[0729] In order to identify SNP markers useful for racial classification, SNPs were targeted in the human pigmentation and xenobiotic metabolism genes (TYR, TYRP1, OCA2, MC1R, DCT, AP3B, CYP3A4, CYP2C8, CYP2D6, CYP2C9, CYP1A1 and AHR) as well as the HMGCR gene. To identify SNP candidates, we re-sequenced the promoter, exon and 3′ UTR regions for each gene using a racially diverse pool of 200 individuals and supplemented these by mining the public database resources (NCBI:dbSNP). Combining the resources, an average of 44 candidate SNPs were identified per gene (a total of 484 SNPs). The two methods of SNP discovery produced significant overlap, and we observed that most of the informative SNPs (those with minor alleles of higher-frequency) were already present in the public database (NCBI:dbSNP), presumably because the public database was constructed from few donors and, therefore, is biased towards these types of SNPs. Nonetheless, resequencing identified several novel SNPs per gene, and many of them are part of the classifier disclosed herein.

[0730] One hundred unrelated Caucasians were genotyped, as were 100 unrelated African Americans and 30 unrelated Asians (different individuals than those used for resequencing) at 188 of the 484 SNPs (roughly 15 per gene for each of the 11 genes). Five of the SNP markers were genotyped in sample sizes that were roughly double these numbers. Minor allele frequencies spanned from zero (unvalidated SNPs) to 48%. 96 of the 188 SNPs revealed clear genotype classes in the assay, had coherent patterns (i.e., no co-amplification of competing sequences evident) and had minor allele frequencies that were greater than 0.01 in at least one of the three races (validation rate=51%). Most of the SNPs that dropped out at this step had coherent genotype patterns but had minor allele frequencies less than 0.01. Of these 96 SNPs, many revealed genotype distributions and allele frequencies that were not significantly different between the racial classes (for example, see Table 14-1). These SNP markers were discarded from our analysis.

[0731] Others revealed genotype distributions and allele frequencies which were not necessarily the same between the three racial groups, but which were not significantly different using a chi-square test. Usually, the frequency of the minor allele for these SNPs was exceedingly low (though at least 1% in one of the racial groups; Table 14-2), and we discarded these SNPs from further analysis as well.

[0732] Sixty-seven (67) of the 96 validated SNP markers revealed genotype distributions and allele frequencies that were statistically different between the three ethnic groups (Table 3). Minor alleles for each of these 68 SNP markers were preferentially represented in one of the three major racial groups tested (Asians, African Americans or Caucasians) and many of these SNPs showed dramatic differences between the groups. All three of the possible preference categories were observed; preferentially present in the Caucasian population (n=25), preferentially present in the Asian population (n=10) and preferentially present in the African American population (n=32). Most of the SNP markers had alleles that were in Hardy-Wienberg Equilibrium (HWE) (data not shown). Three of the 67 SNPs were not in HWE, likely because the assay for these SNPs co-amplified competing sequences, but because there were discrete classes of alleles (i.e., XX, XY and YY), because the results were reproducible, and, because there were racial differences in genotypes, we included them in this analysis. Table 14-3 shows SNP markers for which genotype distributions and allele frequencies were significantly different between the racial classes. Nucleotide composition for the SNP markers listed in Table 14-3 are shown in Table 1 (three were discarded due to high failure rates).

[0733] The breakdown of the number of SNPs per gene, with minor allele frequencies that were different between the three racial groups, reveal that most of the useful SNPs were in the OCA2 gene (n=18; Table 14-4). OCA2 is an oculocutaneous albinism gene that plays a role in the synthesis of eumelanin. The second most number of racially informative SNPs was found in the CYP2D6 gene (n=12). By gene type, 85% of the pigmentation gene SNPs (TYR, TYRP1, MC1R and OCA2) were racially informative (33/39) and the variance of the ratio of racially informative/total SNPs tested within this class of genes was remarkably low (i.e., each of the genes had a similar ratio). In contrast, only 61% of the xenobiotic metabolism SNPs were racially informative (28/46). As with the pigmentation gene class, the variance of the ratio of racially informative SNPs to uninformative was very low. Lastly, SNPs from two non-pigmentation or xenobiotic metabolism genes were also tested, and 28% of these SNPs were racially informative (6/21). Because the minor alleles for most of the SNPs in these two genes were relatively rare, when adjusted for frequency, the percentage of the total number of racially informative alleles counted is closer to 1%. Corrected by the number of SNPs tested per gene, the OCA2, TYR, TYRP1 genes, all pigmentation genes, minor alleles with frequencies that were most often distinct between the racial groups.

[0734] To develop a classifier using these SNPs, a linear classification algorithm was developed and implemented. The algorithm computes a variance/covariance matrix for all possible trait class pairs, represents individual samples as n-dimensional vectors (n=number of markers), measures average distances between these vectors and class (race) mean vectors and then classifies the sample into the class for which the distance is lowest (See Example 15 for more details). Using an iterative sampling scheme, the sample mean vectors are rendered unbiased estimates. Missing data complicated the analysis using this scheme, so we discarded markers 217487, 217439, 664784, 217460, 217473, 615925 and 664785, which had high failure rates in at least one of the three racial groups. Using the sixty SNP markers that were left after this subtraction, individual differences from the mean of each class were calculated for the 230 individuals of African (AA), Asian (AI) and Caucasian (CA) descent (the same individuals genotyped in Table 3, no racial mixtures) and each was classified into one of the racial groups to produce an exclusion probability matrix (Table 14-5).

[0735] From the resulting class (race) exclusion probability matrix, we observed extremely low corrected probabilities (See Example 15 for more details) of excluding an AA individual from the AA group (pr=0.0016), an AI individual from the AI group (pr=0.0001) and a CA individual from the CA group (pr<0.0001; Table 14-5). Uncorrected probabilities were equally impressive (Table 14-5). These probabilities exceeded those produced by Shriver et al. (1997) using STR markers, which were claimed to be log likelihood about 3, or about 1 in 1,000 (though see discussion for criticisms). Corrected probabilities for excluding individuals from incorrect racial groups were generally very high—the lowest less than 1 in 10,000 (AA misclassified as CA, row one, column 3, Table 14-5).

[0736] Because genotyping expense for a sample is in direct proportion to the number of markers tested, the exclusion probabilities for a smaller group of SNPs were calculated. A subset of 15 of the 60 markers were randomly selected and classified them using the linear classifier (Example 15), a similar number as that required for the production of log 10=3 exclusion probabilities using selected STR markers (17; Shriver et al., 1997). Exclusion probabilities were poor; the probability of excluding an AA individual from the AA group (pr=0.143), an AI individual from the AI group (pr=0.148) and a CA individual from the CA group (pr<0.096) were generally not suitable for forensics purposes (Table 14-6). Given that bi-allelic markers possess less information than multi-allelic markers, this result was not unexpected.

[0737] To determine whether the 60-SNP classifier model generalized well, the classifier was used to categorize an additional 275 unrelated Caucasians and 12 unrelated African Americans (none of the individuals were racial mixtures). These individuals were not included in the resequencing group or the group of 230 individuals used to generate the classifier model. The accuracy for Caucasian classification was 100% (275/275 classified as Caucasian) and the accuracy for classifying the 12 individuals of African descent was also 100% (12/12). Given the previously described results, 505/505 individuals were classified with perfect results.

Discussion

[0738] A battery of 60 SNPs within the human pigmentation and xenobiotic metabolism genes were identified that can be used to reliably classify an individual DNA specimen into one of three major racial groups. Using a sample of 275 individuals, the estimated exclusion probabilities for cognate classifications was very low (less than I in 10,000). Applied for the classification of 505 individuals, the classifier showed perfect accuracy. In order to guide a criminal investigation based on DNA sequence, or to justify the use a specific reference population for statistical calculations, the power of racial exclusion must be extremely high, and the classifier we have described appears to be quite promising in light of this requirement. Though the estimates disclosed herein are believed to be unbiased, the next step is to validate the estimates of exclusion in larger populations of African, Caucasian and Asian individuals, as well as in other racial groups (Latinos, Middle Eastern, etc.). Further, the classifier disclosed in this Example needs to be tested for its ability to resolve between ethnic groups within races (i.e., Japanese, Korean, and Chinese, within the Asian group). Nonetheless, until Shriver et al. (1997) described how STR markers could be used for racial profiling, DNA testing was merely a quantitative tool capable of producing numeric “bar-codes” for matching specimens and individuals. The classifier disclosed herein is the third qualitative forensics tool (Shriver et al., 1997) and second racial classifier yet discovered.

[0739] To find good SNP markers of race, the human pigmentation and xenobiotic genes were targeted with the assumption that these genes had been subject to unusually strong systematic genetic forces over the course of human evolution. For the pigmentation genes, a prediction was made that sexual selection and geographical isolation had affected gene sequence distributions between the worlds various racial groups. For the xenobiotic genes, it was reasoned that unique diets in the various regions of the world had imposed unique and powerful constraints on sequence diversity within and between racial groups (i.e., geographical isolation and possibly, selection). Previous screens for racially informative STR markers have proven difficult due to their rarity. In one screen of 1,000 STR loci (Shriver et al., 1997), racial allele distributions were found for only 17 (1.7%, though this is likely to be a low estimate of their frequency in the genome due to the sample sizes used for each STR).

[0740] Single nucleotide polymorphisms (SNPs) were surveyed from two non-pigmentation and non-xenobiotic metabolism genes (HMGCR, FDPS), and disclosed a somewhat higher percentage of SNPs to be of value for predicting race (about 28%). How typical these two genes are is not clear, but many of the SNPs in these genes were not frequent so their racial value is subject to more debate. In fact, when adjusted for allelic frequency, the percentage of racially informative minor alleles counted in these genes, with respect to the total number counted for all genes, is closer to 1%. In contrast, the frequency of racially informative SNPs in the human pigmentation and xenobiotic metabolism genes was significantly higher; 85% (33/39) of the pigmentation gene SNPs and 61% (28/46) of the xenobiotic metabolism gene SNPs were racially informative. The total number of counted minor alleles from these genes included over 99% the total number counted, though they represented only 80% (85/106) the total number of validated SNPs studied. These results confirm that systematic forces shape pigmentation and xenobiotic metabolism gene allelic variance between these three racial groups, and that the disclosed strategy can be used for identifying racially informative markers by targeting these genes. Further, these results indicate that the model generated herein can be extended well to other racial groups.

[0741] The racial classifier disclosed herein was developed from 230 individuals of African, Asian and Caucasian descent. Its performance was confirmed in another group of 287 individuals. Though 505 individuals were used to develop and test the classifier, larger sample sizes will almost certainly drop the exclusion probabilities because many of the racially informative markers were monomorphic in one or more of the racial groups. This situation precludes their use with the quadratic classifier (See Example 15), which generally produces a superior result. Nonetheless, the statistical problems associated with monomorphism are less influential than with STR markers because a) we used a linear classification approach rather than log likelihood, and b) with STR markers, monomorphism is more likely to exist for several alleles at a given locus, whereas with SNP markers it can exist with only one. By increasing the sample sizes by a factor of only 2, we are likely to be able to apply the geometric classifier for all 60 SNPs. Further, by increasing the number of racially mixed individuals in future studies, the disclosed linear classifier, or a quadratic one, can be one of the first classifiers capable of resolving racially mixed individuals. It is anticipated that, because our classifier relies on individual vector differences from the mean, and because mixed individuals are likely to be evenly mixed for a majority of alleles, the probabilities of exclusion from homogeneous racial groups is likely to be greater than for mixed groups made of them. Previous methods with STR markers did not test racial mixes (within individuals), though because they rely on log likelihood ratios and their alleles are heterogeneous, it is unlikely that they would be powerful enough to resolve them satisfactorily without invoking a number of significant digits illegitimate for the sample sizes used in their generation.

[0742] The accuracy of correctly classifying individuals of African descent was the lowest of the three racial groups (misclassification 2 in 1000). This result is interesting because the age of the African lines, and the genetic complexity of Africans, in general, is the greatest among the worlds various racial groups (Tishkoff et al., 2000; Mateu et al., 2001).

[0743] Previous STR methods described alleles with log10=1.858 (r=72) in power for discriminating between individuals of African versus European origin. Other statistical measures of the same data gave lower values (log10=1.59; Erikson and Svensmark, Int. J. Legal Med. 106:254-257, 1994). It would appear that “by all accounts, the FY-locus is a powerful marker for discriminating between individuals of African versus Caucasian origin” and that “in 96% of the cases in which an unknown stain donor is African American, this locus alone will answer the question of ethnic origin” (Brenner, Proceedings 7^{th} Intl. Symposium on Hum. Identification 4892, 1997). However, Brenner performed Monte Carlo computer simulations which suggested that the 17 markers were discovered from the approximately 1,000 canvassed due to sampling bias rather than due to their true value as markers of race. Brenner thus proposed that the procedure used could be successful in identifying “a set of 10 loci that differentiate the 9-year-old children from the 10-year-olds in the local playground”. He also further criticized the STR methods by posing an interesting question about the confounding affects of allelic association between STR loci.

[0744] Herein lie the main deficiencies of the STR based approach for racial classification. Because small number of complex loci are used, low sample sizes are for STR allele classes are invoked. As a result, estimated parameters can be (and are often) distorted. Further, because of the small numbers of loci, linkage effects between loci that muddle the data are magnified. SNP based methodologies, such as that disclosed herein, offer an alternative for overcoming these deficiencies. Due to higher minor allele frequencies, which can actually be crafted from very large numbers of candidate SNPs, estimated parameters such as allele frequency estimation are more likely to be unbiased and, therefore, useful for their intended purpose. Due to the larger number of loci used (60 in our battery versus 14 in Shriver's 1997 STR battery), linkage problems that bias the sample size towards one or another conclusion are minimized. The allele frequencies of the SNPs as disclosed herein are higher, the sample sizes used to estimate these frequencies greater, and the reliability of our frequency estimates superior. As a result, the discriminatory power of the SNP battery disclosed herein is significantly greater than this STR method (exclusion probabilities exceeding I in 10,000 versus I in less than 1000). Thus, the classifier not only is the first SNP base method for reliably distinguishing between the world's major racial groups, but also can be the best method for this purpose defacto.

[0745] Even if the inertia for changing from STR to SNP based methods is great, the SNP battery also is useful as a complement to current testing approaches. In particular, the battery disclosed herein can be useful for both racial classification and human identification in cases where sample integrity is a problem. STR tests require DNA that is generally intact because STR regions are amplified from the DNA in a manner that is effectively sensitive to the concentration of intact DNA sequence between the primers used. For a given level of DNA degradation, the chance of successful amplification (and typing) of lengthy targets is lower than for shorter targets because the probability of discontinuity between PCR primers increases as the length between the primers increases. Because the probability that a polymorphic site is successfully amplified for genetic typing is a function of the length of the amplification product, the amount of DNA used and the degree of DNA degradation, all other things being equal, the disclosed battery of 60 SNPs provides advantages where there is a small amount of DNA available and/or the DNA is degraded. Because the amount and integrity of DNA is often suboptimal for forensic investigations, the disclosed battery can provide a useful adjunct to current STR based methods. In cases of extreme sample limitation, mitochondrial DNA approaches are preferred, though no mitochondrial method has, to our knowledge, yet been described for racial classification.

TABLE 14-1

| | | | | XX | XY | YY | | | |
|---|---|---|---|---|---|---|---|---|---|
| | XX | XY | YY | AFRICAN | AFRICAN | AFRICAN | XX | XY | YY |
| Marker | ASIAN | ASIAN | ASIAN | AMERICAN | AMERICAN | AMERICAN | CA | CA | CA |
| 809123 | 25 | 5 | 0 | 77 | 12 | 0 | 71 | 16 | 0 |
| 809126 | 0 | 2 | 28 | 1 | 8 | 81 | 0 | 5 | 83 |
| 869756 | 26 | 0 | 0 | 60 | 2 | 0 | 69 | 0 | 0 |
| 869766 | 30 | 0 | 0 | 87 | 3 | 0 | 87 | 0 | 0 |
| 869806 | 0 | 11 | 19 | 6 | 34 | 50 | 5 | 32 | 51 |
| 971872 | 30 | 0 | 0 | 86 | 3 | 0 | 83 | 3 | 0 |

[0746] Table 14-1 provides examples of SNP markers for which genotype distributions and allele frequencies were not significantly different between the racial classes. Only a few of the SNP markers of this class are shown. Each row shows the data for a single SNP, which is referred to as a “marker”. Individual counts for these markers are shown. Within each racial group (shown at the top of the table), counts for the allele I homozygote class (XX): the heterozygote class (XY): and the allele 2 (YY) homozygote class are shown.

TABLE 14-2

| | | | | XX | XY | YY | | | |
|---|---|---|---|---|---|---|---|---|---|
| | XX | XY | YY | AFRICAN | AFRICAN | AFRICAN | XX | XY | YY |
| Marker | ASIAN | ASIAN | ASIAN | AMERICAN | AMERICAN | AMERICAN | CA | CA | CA |
| 869780 | 25 | 0 | 0 | 87 | 1 | 0 | 75 | 0 | 0 |
| 951520 | 29 | 1 | 0 | 90 | 0 | 0 | 87 | 1 | 0 |

[0747] Table 14-2 shows SNP markers for which genotype distributions and allele frequencies were not significantly different between the racial classes. Only a few of the SNP markers of this class are shown. Each row shows the data for a single SNP (“marker”). Individual counts for these markers are shown. Within each racial group (shown at the top of the table), counts for the allele 1 homozygote class (XX): the heterozygote class (XY): and the allele 2 (YY) homozygote class are shown.

TABLE 14-3

| | | | | XX | XY | YY | | | | |
|---|---|---|---|---|---|---|---|---|---|---|
| | XX | XY | YY | AFRICAN | AFRICAN | AFRICAN | XX | XY | YY | SEQ ID |
| Marker | ASIAN | ASIAN | ASIAN | AMERICAN | AMERICAN | AMERICAN | CA | CA | CA | NO: |
| 217438 | 15 | 15 | 0 | 88 | 2 | 0 | 73 | 14 | 0 | 4 |
| 217439 | 30 | 0 | 0 | 85 | 0 | 0 | 73 | 2 | 0 | 5 |
| 217441 | 29 | 0 | 0 | 86 | 2 | 0 | 74 | 13 | 0 | 6 |
| 217452 | 30 | 0 | 0 | 61 | 2 | 27 | 74 | 0 | 14 | 11 |
| 217455 | 10 | 16 | 4 | 61 | 23 | 5 | 7 | 32 | 49 | 21 |
| 217456 | 29 | 1 | 0 | 87 | 3 | 0 | 73 | 15 | 0 | 35 |
| 217459 | 59 | 0 | 0 | 166 | 10 | 0 | 175 | 0 | 0 | 52 |
| 217460 | 0 | 0 | 27 | 2 | 31 | 46 | 0 | 0 | 86 | 53 |
| 217468 | 26 | 0 | 0 | 81 | 8 | 1 | 32 | 46 | 10 | 43 |
| 217473 | 40 | 1 | 0 | 138 | 17 | 0 | 103 | 55 | 0 | 44 |
| 217480 | 30 | 0 | 0 | 86 | 0 | 0 | 83 | 5 | 0 | 41 |
| 217485 | 28 | 0 | 0 | 71 | 19 | 7 | 14 | 46 | 39 | 45 |
| 217486 | 28 | 1 | 0 | 64 | 20 | 5 | 12 | 42 | 34 | 46 |
| 217487 | 0 | 10 | 0 | 23 | 18 | 0 | 59 | 7 | 0 | 54 |
| 217489 | 0 | 3 | 53 | 16 | 53 | 100 | 70 | 76 | 18 | 55 |
| 554353 | 29 | 0 | 0 | 89 | 0 | 0 | 83 | 3 | 0 | 56 |
| 554363 | 0 | 3 | 27 | 1 | 5 | 84 | 0 | 0 | 88 | 57 |
| 554368 | 28 | 0 | 0 | 88 | 1 | 0 | 83 | 5 | 0 | 58 |
| 554370 | 29 | 0 | 0 | 64 | 14 | 10 | 78 | 0 | 0 | 59 |
| 554371 | 7 | 12 | 9 | 67 | 7 | 14 | 54 | 12 | 19 | 60 |
| 615921 | 30 | 0 | 0 | 81 | 6 | 2 | 86 | 1 | 0 | 61 |
| 615925 | 29 | 0 | 0 | 44 | 9 | 15 | 44 | 15 | 10 | 62 |
| 615926 | 51 | 6 | 0 | 118 | 62 | 0 | 130 | 45 | 0 | 63 |
| 664784 | 0 | 30 | 29 | 0 | 90 | 65 | 0 | 88 | 62 | 64 |
| 664785 | 0 | 34 | 17 | 0 | 213 | 6 | 0 | 193 | 7 | 65 |
| 664793 | 0 | 0 | 30 | 0 | 12 | 78 | 0 | 5 | 83 | 66 |
| 664802 | 30 | 0 | 0 | 81 | 9 | 0 | 88 | 0 | 0 | 67 |
| 664803 | 0 | 0 | 30 | 0 | 35 | 15 | 0 | 5 | 81 | 68 |
| 712037 | 16 | 12 | 2 | 11 | 53 | 11 | 76 | 12 | 0 | 69 |
| 712047 | 8 | 22 | 0 | 62 | 28 | 0 | 12 | 76 | 0 | 70 |
| 712051 | 30 | 0 | 0 | 78 | 12 | 0 | 88 | 0 | 0 | 71 |
| 712052 | 14 | 10 | 6 | 2 | 15 | 73 | 5 | 32 | 51 | 12 |
| 712054 | 4 | 17 | 9 | 12 | 45 | 33 | 17 | 45 | 26 | 18 |
| 712055 | 0 | 2 | 28 | 7 | 37 | 45 | 0 | 9 | 78 | 72 |
| 712057 | 0 | 10 | 20 | 49 | 36 | 5 | 64 | 20 | 4 | 14 |
| 712058 | 3 | 6 | 21 | 55 | 29 | 4 | 75 | 12 | 0 | 15 |
| 712059 | 4 | 17 | 9 | 12 | 45 | 33 | 17 | 45 | 26 | 73 |
| 712064 | 9 | 15 | 6 | 0 | 1 | 89 | 0 | 0 | 88 | 17 |
| 712043 | 29 | 0 | 1 | 84 | 6 | 0 | 69 | 18 | 1 | 74 |
| 756239 | 0 | 0 | 30 | 0 | 18 | 72 | 0 | 0 | 88 | 75 |
| 756251 | 30 | 0 | 0 | 74 | 15 | 1 | 56 | 30 | 2 | 76 |
| 809125 | 29 | 0 | 1 | 83 | 6 | 0 | 69 | 18 | 1 | 77 |
| 869745 | 0 | 0 | 30 | 1 | 5 | 84 | 0 | 0 | 88 | 48 |
| 869769 | 8 | 15 | 6 | 11 | 33 | 45 | 5 | 31 | 52 | 78 |
| 869772 | 29 | 1 | 0 | 48 | 32 | 10 | 87 | 1 | 0 | 79 |
| 869777 | 4 | 16 | 10 | 16 | 31 | 43 | 22 | 33 | 33 | 80 |
| 869784 | 7 | 23 | 0 | 3 | 87 | 0 | 4 | 83 | 1 | 81 |
| 869785 | 30 | 0 | 0 | 70 | 12 | 8 | 88 | 0 | 0 | 82 |
| 869787 | 0 | 0 | 30 | 1 | 5 | 84 | 0 | 0 | 88 | 47 |
| 869794 | 0 | 1 | 27 | 0 | 2 | 87 | 1 | 28 | 59 | 83 |
| 869797 | 0 | 0 | 30 | 14 | 17 | 59 | 10 | 19 | 59 | 84 |
| 869798 | 0 | 0 | 30 | 0 | 20 | 70 | 0 | 0 | 87 | 85 |
| 869802 | 0 | 5 | 25 | 0 | 20 | 70 | 0 | 0 | 83 | 86 |
| 869809 | 0 | 0 | 30 | 0 | 3 | 87 | 1 | 9 | 77 | 87 |
| 869810 | 0 | 5 | 25 | 0 | 2 | 88 | 1 | 10 | 77 | 88 |
| 869813 | 0 | 0 | 30 | 2 | 17 | 71 | 0 | 0 | 87 | 89 |
| 886892 | 0 | 0 | 30 | 0 | 4 | 86 | 0 | 17 | 71 | 23 |
| 886894 | 18 | 9 | 2 | 64 | 22 | 4 | 11 | 44 | 33 | 8 |
| 886895 | 19 | 8 | 3 | 10 | 36 | 44 | 1 | 22 | 65 | 9 |
| 886896 | 27 | 3 | 0 | 64 | 21 | 4 | 11 | 45 | 32 | 10 |
| 886933 | 1 | 6 | 23 | 4 | 33 | 53 | 0 | 13 | 75 | 49 |
| 886934 | 0 | 0 | 30 | 0 | 2 | 88 | 0 | 14 | 74 | 90 |
| 886937 | 30 | 0 | 0 | 81 | 8 | 1 | 74 | 14 | 0 | 50 |
| 886993 | 29 | 1 | 0 | 22 | 41 | 27 | 47 | 37 | 2 | 91 |
| 886994 | 0 | 1 | 29 | 28 | 40 | 22 | 2 | 38 | 47 | 13 |
| 951497 | 19 | 11 | 0 | 47 | 37 | 6 | 67 | 21 | 0 | 42 |
| 951526 | 0 | 0 | 30 | 2 | 13 | 73 | 0 | 0 | 85 | 92 |

[0748] Table 14-3 shows SNP markers for which genotype distributions and allele frequencies were significantly different between the racial classes. The results show genotype counts in 30 Asians, 100 Africans and I100 Caucasians, though five of the SNP markers were genotyped in sample sizes that were roughly double these numbers. SNP unique identifiers are shown in column 1, and the XX, XY and YY allele counts are shown for each of the three racial groups listed at the top of the table.

TABLE 14-4

| GENE | NO. SNPS | TOTAL TESTED |
|---|---|---|
| OCA2 | 18 | 19 |
| CYP2D6 | 12 | 21 |
| TYRP1 | 8 | 9 |
| CYP2C9 | 7 | 14 |
| CYP3A4 | 4 | 8 |
| TYR | 4 | 5 |
| HMGCR | 4 | 13 |
| MC1R | 3 | 6 |
| FDPS | 2 | 8 |
| AHR | 1 | 3 |
| CYP1A1 | 1 | 2 |
| TOTAL | 64 | 108 |

[0749] TABLE 14-5

| | AA | | | | | |
|---|---|---|---|---|---|---|
| | | No | AI | | CA | |
| | Correction | Correction | Correction | No Correction | Correction | No Correction |
| AA | 0.00189 | 0.00161 | 0.99998 | 0.99998 | 0.99974 | 0.99976 |
| AI | 0.99999 | 0.99999 | 0.00013 | 0.00011 | 0.99999 | 0.99999 |
| CA | 0.99999 | 0.99999 | 0.99999 | 0.99999 | 0.00006 | 0.00005 |

[0750] Table 5 shows a racial exclusion probability matrix derived from the linear classifier for individuals of African (AA), Asian (AI) and Caucasian (CA) descent using the 60 SNP markers described in the text. Because the number of Asians in this analysis (15) was lower than the number of markers, we broke the analysis into 4 groups of 15 markers, calculated the variance covariance matrix using all 230 individuals for each group of SNPs and generated an exclusion matrix for each. These were then combined into one matrix by calculating the exclusion probability as 9x, from x-SNP group 1 to SNP group 4 for each cell. Though perfect classification results were obtained with our sample of 505 individuals, the exclusion probability matrix is composed of non-zero values due to the implementation of this particular sampling method. To generate the composite classifier, zero probabilities present in a group were arbitrarily adjusted to 0.01 to avoid multiplication by zero (this occurred only for AI cells, due to the low AI sample size of 15). The matrix is square because of asymmetry in ordinate metrics; the X ordinate represents class means and the Y ordinate represents classification frequencies.

TABLE 14-6

| | AA | | AI | | CA | |
|---|---|---|---|---|---|---|
| | Correction | No Correction | Correction | No Correction | Correction | No Correction |
| AA | 0.14290 | 0.14290 | 0.98700 | 0.98700 | 0.87010 | 0.87010 |
| AI | 0.96300 | 0.96300 | 0.18520 | 0.14810 | 0.85190 | 0.88890 |
| CA | 0.97590 | 0.97590 | 0.91570 | 0.92770 | 0.10840 | 0.09640 |

Table 6 shows a racial exclusion probability matrix derived from the linear classifier for individuals of African (AA), Asian (AI) and Caucasian (CA) descent using a randomly selected set of 15 SNP markers of the 60 described in the text.

### EXAMPLE 15

### Classifier Tool

[0751] This example discloses an innovative linear and quadratic classifier construction tool for multivariate trait classification using multi-locus genotypes. A software-based method was developed for incorporating multiple genetic attributes into a linear and/or quadratic classifier. This method has certain strengths and weaknesses over other approaches such as Correspondence analysis method and the Classification Tree method. The latter method is best suited for situations where the trait is subject to genetic dominance. The disclosed linear and quadratic methods, which use sample means as a basis for classification, are superior in cases where the trait is subject of additive effects but not genetic dominance. The method is as easily applied for haplotype or phase-unknown analysis and performs well whatever the marker type (RFLP, STR, SNP etc.).

[0752] The problem of classifying a given individual as a member of one of several populations or groups to which that particular individual can possibly belong is of interest to many types of scientists, including, for example, statisticians, geneticists, anthropologists, taxonomists, psychologists and sociologists. There are mainly 3 approaches in the classification analysis, namely, 1) parametric, 2) semi-parametric, and 3) non-parametric and their robust (Balakrishnan, et al., Handbook of Statistics 1991; 8:145-202.) versions. In each approach, many contributions have been made by various authors (McLachlan, G. J., Wiley, New York, 1992.). Though linear and quadratic classification procedures have been well documented in the literature, few algorithms have been generated for their implementation as software tools within the field of complex genetics. Disclosed herein is the implementation of a parametric multivariate linear classification (Fisher, 1936) and Quadratic classification (Anderson, T. W., Introductin to Multivariate Statistical Analysis. Wiley, New York 1958; Srivastava et al., Mykosen. 1979 September;22(9):311-3; Srivastava, M. S. et al., “An introduction to multivariate statistics,” North Holland, Amsterdam: 1979) with their modifications for genomics data (Spilman et al., 1976, Smouse, P. E., et al., Genetics 1977; 85:733-752).

[0753] Under the assumption that the samples have been taken from multivariate normal distributions with different mean vectors with common variance covariance matrix, linear classification procedure introduced by Fisher (1936), Rao (1947, 1948a, 1948b), or Smith (1947) can be applied. However, if the populations have different variance covariance matrices, quadratic classification should be used. For the linear method, the pooled within-population variance-covariance matrix can be computed from the formula:
S=Σ^{p}ᵢ₌₁Σ^{Ni}ⱼ₌₁(Yᵢⱼ−μᵢ)(Yᵢⱼ−μᵢ)′/ΣNᵢ−1) (1)
Where Yᵢⱼ is the vector of character measurements for the j'th individual in the i'th trait value. μᵢ and Nᵢ are the vector of means and sample size for the i'th trait value. The components for these vectors could be surrogate values for SNP alleles, each dimension of the vector representing a different locus. The components may or may not be linked to one another in gametic disequilibrium (i.e., it may or may not be part of a haplotype system). Indeed, this is a strength of the method—it is equally applicable to SNPs on different chromosomes as to those within a particular gene. The generalized distance of the ij'th individual from the mean of the k'th trait value can be computed from the formula:
D²_{ij,k}=(Yᵢⱼ−μₖ)′S(Yᵢⱼ−μₖ) for k≠i (2)

[0754] The vector Yᵢⱼ is used to calculate μₖ, the mean of it's own trait value. To avoid circularity caused by this, Smouse, supra, (1977) (see also Spielman, R. S. et al., Am. J Hum Genet. 1976; 28:317-331) used correction when comparing an element with its own class. In the case of complex genetics, we use this to correct for circularity caused by comparing an individual with the mean of its own trait value:
D²_{ij,i}=(Nᵢ/(Nᵢ−1)²(Yᵢⱼ−μᵢ)′S⁻¹(Yᵢⱼ−μᵢ) (3)

[0755] The usual procedure is to allocate the ij'th individual to that trait value for which (2)/(3) is minimum. Large between class distances, relative to within class differences, provide justification for using the mean vector values for each class as a classifier tool. In this case, an unknown vector is compared to the mean vectors for the various classes, and the class that minimizes (2) and (3) is selected. Depending on the magnitude of (2) for the various classes, there may be ambiguity for some individual vectors, in which case the classifier can either produce a hybrid classification (a prediction of “mixture”) or offer an inconclusive result. The result of applying (2) and (3) is a inclusion or exclusion probability matrix for the various trait classes.

[0756] A quadratic classification procedure for genetic classification can also be implemented. The quadratic discriminant score for the i'th trait value is:
D²_{ij,k}=ln/Sₖ/+(Yᵢⱼ−μₖ)′Sⁱₖ(Yᵢⱼ−μₖ) for k=1, 2, . . . g(trait values) (4)
Classification is then simply the allocation of the ij'th individual to that trait value for which (4) is minimum.

### EXAMPLE 16

### Recording Method for Improved Classification

[0757] This example discloses a recording method for improving the classification analysis. Under the assumption of normality, the sample mean vector and the sample covariance matrix constitute minimally sufficient statistics, in the sense that any inference based of them carries with it all the information available in the sample.

[0758] Thus any classification rule based on these summary statistics ought to be optimal from the point of view of sample information used for their analysis. However it appears that the data can provide some additional information which are not reflected by these statistics. The question, therefore, is: Can this additional information be used for improving the results that were based on these statistics?

[0759] A closer scrutiny of the frequency distributions of gene-wise genotypes, based on the given sample data (for the 10 genes), reveal that some genotypes exhibit larger (relative) variations in their frequency of occurrences across colors than others (Table 16-1).

[0760] It is well known that those with larger variations in their (relative) frequencies, across the colors, have better discriminating ability for colors. From that context the genotypes g(1,1), g(2,3), g(3,1), g(4,1), g(5,1), g(6,2), g(7,2), g(8,2), g(9,2) and g(10.3) can be useful (and, therefore, stronger) for discrimination, both in terms of their frequencies as well as their ranges of variation, than the others, with the g(1,1), g(3,1) and g(4,1) being the relatively stronger among them (See Table 16-3 for coding key). Obviously, the next ranked genotypes within each gene have lesser strength for discrimination among colors. In the given data, keeping in view the total frequencies of their occurrences one can identify the following second ranked genotypes within each gene.
[0761] g(1,2), g(2,1), g(3,2), g(4,2), g(5,4), g(6,1), g(7,5), g(8,1), g(9,1) and g(10.103)

[0762] It can be noted that these genotypes have fairly large frequencies (>5 in each color) and have weaker (than those that were ranked as ‘best’) discriminating power, (as their relative frequencies are almost equal across colors). One method of extracting more useful information from these genotypes could be to incorporate a measure of their association with any or all of the above mentioned ‘best’ genotypes.

[0763] The procedure used in the present analysis is to recode the weaker genotypes whenever they appear along with the ‘best’ ones in a an individual sample unit. Specifically the procedure used is as follows:
[0764] Step 1. Identify a small number of ‘best’ genotypes for cross-coding the weak genotypes.
   [0765] This can be done by selecting a subset of the ‘best’ in each gene according to their range of variation in their relative frequencies. One can try various combinations and arrive at the optimal selection. Our study revealed an optimal choice of the three genotypes g(1,1) (OCA2A), g(3,1) (OCA2C) and g(4,1) (OCA2D).
[0766] Step 2: Recoding of second best genotypes:
   [0767] Assign Code 0 if the genotype are absent
   [0768] Assign Code 1+(the number of selected ‘best’ genotypes it occurs together in an individual). For example if two of the best genotypes occurs in an individual, a weaker genotype score would be its value plus 1. Such recoding will generally increase the variability of scores across the colors (while carrying out the usual discriminant analysis), and hence one can expect a marginal improvement over the results obtained before incorporating such a recoding procedure in them.

[0769] There are some advantages and warning signals that go with the proposed methodology. Regarding advantages of the methodology, first, statistically, any attempt to increase the variability of the scores of genotypes across colors, should lead to a better classification since it increases the discriminating ability of the genotype. Second, if the result turns out to be relatively better, the method can provide clues or a source of hypotheses of the relationships between genotypes of different genes in relation to the phenotype, such as a pigmentation trait under study. Third, although the coding procedure may seem arbitrary, encouraging improvements, if any, may be important from a practical point of view, especially in the context of reducing the classification errors. Fourth, there are instances, especially in the area of statistical forecasting of time series, wherein data supported methods are recommended, as long as they lead to relatively more accurate inferences.

[0770] Regarding warning signals of the methodology, first, the arbitrary nature of the coding has to be justified from a theoretical point of view. Second, the sample size should be large enough for the recoded genotypes, so that the exercise does not become data specific.
[0771] The method was tried for the data involving 286 individuals with reference to the following 10 genes. OCA2A, OCA2B, OCA2C, OCA2D, OCA2E, MICRA, TYRA, TYRPA, TYRPB, AND DCT B.

[0772] Towards exploring the possibility of successive application of the method, the recoding exercise was carried out on the data set obtained after recoding the genotypes g(2,1), g(5,4), g(6,1), g(7,5), g(8,1), g(9,1) and g(10.103) with reference to the three ‘best’ genotypes selected, namely g(1,1) (OCA2A), g(3,1) (OCA2C) and g(4,1) (OCA2D). In this case relative frequencies were not obtained but the average scores for each genotypes (since some codes are larger than unity) (Table 16-2 is the reflection of Table 16-1 at this stage).

[0773] Using these averages three ‘best’ genotype were identified as g(2,1), g(3,1) and g(4,1). At this stage the genotypes g(1,2), g(4,5), g(5,1), g(7,1), g(8,1), g(9,2) and g(10,1) were recoded with reference to the genotypes g(2,1), g(3,1) and g(4,1) using the same recoding procedure.

TABLE 16-1

| genotype | Blue | green | hazel | brown | range |
|---|---|---|---|---|---|
| G(1, 1) | 0.56701 | 0.386667 | 0.366667 | 0.511905 | 0.200344 |
| G(1, 2) | 0.14433 | 0.226667 | 0.233333 | 0.166667 | 0.089003 |
| G(1, 3) | 0.041237 | 0.013333 | 0 | 0 | 0.041237 |
| G(1, 4) | 0.051546 | 0.013333 | 0.033333 | 0.02381 | 0.038213 |
| G(1, 5) | 0.103093 | 0.12 | 0.166667 | 0.166667 | 0.063574 |
| G(1, 6) | 0 | 0.026667 | 0 | 0 | 0.026667 |
| g(1, 7) | 0.010309 | 0 | 0 | 0 | 0.010309 |
| g(1, 8) | 0.010309 | 0.026667 | 0 | 0 | 0.026667 |
| g(1, 9) | 0.020619 | 0.066667 | 0.133333 | 0 | 0.133333 |
| g(1, 10) | 0.010309 | 0.053333 | 0 | 0.02381 | 0.053333 |
| g(1, 11) | 0 | 0 | 0 | 0.011905 | 0.011905 |
| g(1, 12) | 0.010309 | 0.026667 | 0.1 | 0.059524 | 0.089691 |
| g(1, 13) | 0.010309 | 0 | 0.033333 | 0 | 0.033333 |
| g(1, 14) | 0 | 0.013333 | 0 | 0 | 0.013333 |
| g(1, 15) | 0.010309 | 0 | 0 | 0 | 0.010309 |
| g(1, 16) | 0 | 0.013333 | 0 | 0 | 0.013333 |
| g(1, 17) | 0 | 0 | 0 | 0.011905 | 0.011905 |
| g(1, 18) | 0.010309 | 0 | 0 | 0 | 0.010309 |
| g(2, 1) | 0.371134 | 0.306667 | 0.3 | 0.416667 | 0.116667 |
| g(2, 2) | 0.164948 | 0.186667 | 0.133333 | 0.154762 | 0.053333 |
| g(2, 3) | 0.319588 | 0.226667 | 0.233333 | 0.154762 | 0.164826 |
| g(2, 4) | 0.030928 | 0.026667 | 0.033333 | 0.071429 | 0.044762 |
| g(2, 5) | 0 | 0 | 0 | 0.02381 | 0.02381 |
| g(2, 6) | 0.051546 | 0.106667 | 0.166667 | 0.047619 | 0.119048 |
| g(2, 7) | 0.010309 | 0.04 | 0 | 0.02381 | 0.04 |
| g(2, 8) | 0 | 0 | 0.033333 | 0 | 0.033333 |
| g(2, 9) | 0.041237 | 0.026667 | 0.066667 | 0.035714 | 0.04 |
| g(2, 10) | 0.010309 | 0.04 | 0.033333 | 0 | 0.04 |
| g(2, 11) | 0 | 0.04 | 0.033333 | 0.011905 | 0.04 |
| g(2, 12) | 0 | 0 | 0.033333 | 0.011905 | 0.033333 |
| g(3, 1) | 0.701031 | 0.6 | 0.4 | 0.52381 | 0.301031 |
| g(3, 2) | 0.154639 | 0.12 | 0.266667 | 0.202381 | 0.146667 |
| g(3, 3) | 0.041237 | 0.053333 | 0.033333 | 0.011905 | 0.041429 |
| g(3, 4) | 0.092784 | 0.106667 | 0.166667 | 0.059524 | 0.107143 |
| g(3, 5) | 0 | 0 | 0.033333 | 0 | 0.033333 |
| g(3, 6) | 0 | 0.066667 | 0.033333 | 0.083333 | 0.083333 |
| g(3, 7) | 0 | 0.026667 | 0 | 0.02381 | 0.026667 |
| g(3, 8) | 0 | 0 | 0.066667 | 0.02381 | 0.066667 |
| g(3, 9) | 0 | 0.026667 | 0 | 0 | 0.026667 |
| g(3, 10) | 0 | 0 | 0.033333 | 0 | 0.033333 |
| g(3, 11) | 0 | 0 | 0 | 0.035714 | 0.035714 |
| g(3, 12) | 0 | 0 | 0 | 0.011905 | 0.011905 |
| g(3, 13) | 0.010309 | 0 | 0 | 0 | 0.010309 |
| g(4, 1) | 0.371134 | 0.253333 | 0.433333 | 0.404762 | 0.18 |
| g(4, 2) | 0.453608 | 0.44 | 0.366667 | 0.369048 | 0.086942 |
| g(4, 3) | 0.010309 | 0.013333 | 0.033333 | 0.035714 | 0.025405 |
| g(4, 4) | 0.010309 | 0.013333 | 0 | 0 | 0.013333 |
| g(4, 5) | 0.113402 | 0.226667 | 0.166667 | 0.095238 | 0.131429 |
| g(4, 6) | 0.041237 | 0.026667 | 0.033333 | 0.059524 | 0.032857 |
| g(4, 7) | 0 | 0.013333 | 0 | 0 | 0.013333 |
| g(4, 8) | 0 | 0 | 0 | 0.011905 | 0.011905 |
| g(5, 1) | 0.608247 | 0.453333 | 0.533333 | 0.547619 | 0.154914 |
| g(5, 2) | 0.092784 | 0.186667 | 0.166667 | 0.107143 | 0.093883 |
| g(5, 3) | 0.134021 | 0.173333 | 0.066667 | 0.142857 | 0.106667 |
| g(5, 4) | 0.14433 | 0.12 | 0.2 | 0.083333 | 0.116667 |
| g(5, 5) | 0.010309 | 0 | 0.033333 | 0.011905 | 0.033333 |
| g(5, 6) | 0 | 0.013333 | 0 | 0 | 0.013333 |
| g(5, 7) | 0 | 0.026667 | 0.033333 | 0 | 0.033333 |
| g(5, 7) | 0.010309 | 0.013333 | 0 | 0.011905 | 0.013333 |
| g(5, 8) | 0 | 0.013333 | 0.033333 | 0.035714 | 0.035714 |
| g(5, 9) | 0 | 0 | 0 | 0.011905 | 0.011905 |
| g(5, 10) | 0 | 0 | 0 | 0.011905 | 0.011905 |
| g(6, 1) | 0.56701 | 0.533333 | 0.5 | 0.607143 | 0.107143 |
| g(6, 2) | 0.134021 | 0.08 | 0.266667 | 0.119048 | 0.186667 |
| g(6, 3) | 0.113402 | 0.186667 | 0.1 | 0.119048 | 0.086667 |
| g(6, 4) | 0.164948 | 0.133333 | 0.2 | 0.095238 | 0.104762 |
| g(6, 5) | 0.010309 | 0.026667 | 0 | 0.011905 | 0.026667 |
| g(6, 6) | 0 | 0.026667 | 0 | 0.011905 | 0.026667 |
| g(6, 7) | 0.010309 | 0.013333 | 0 | 0 | 0.013333 |
| g(7, 1) | 0.030928 | 0.12 | 0.133333 | 0.130952 | 0.102405 |
| g(7, 2) | 0.309278 | 0.253333 | 0.166667 | 0.321429 | 0.154762 |
| g(7, 3) | 0.247423 | 0.266667 | 0.133333 | 0.214286 | 0.133333 |
| g(7, 4) | 0.010309 | 0 | 0.066667 | 0 | 0.066667 |
| g(7, 5) | 0.247423 | 0.16 | 0.233333 | 0.095238 | 0.152185 |
| g(7, 6) | 0.030928 | 0.013333 | 0.1 | 0.011905 | 0.088095 |
| g(7, 7) | 0.010309 | 0.026667 | 0.033333 | 0.011905 | 0.023024 |
| g(7, 8) | 0.103093 | 0.12 | 0.133333 | 0.142857 | 0.039764 |
| g(7, 9) | 0.010309 | 0.026667 | 0 | 0.02381 | 0.026667 |
| g(7, 10) | 0 | 0 | 0.066667 | 0.011905 | 0.066667 |
| g(8, 1) | 0.402062 | 0.293333 | 0.3 | 0.321429 | 0.108729 |
| g(8, 2) | 0.463918 | 0.466667 | 0.566667 | 0.357143 | 0.209524 |
| g(8, 3) | 0.041237 | 0.053333 | 0.033333 | 0.059524 | 0.02619 |
| g(8, 4) | 0.010309 | 0.013333 | 0 | 0 | 0.013333 |
| g(8, 5) | 0.041237 | 0.106667 | 0.166667 | 0.119048 | 0.12543 |
| g(9, 1) | 0.278351 | 0.213333 | 0.266667 | 0.261905 | 0.065017 |
| g(9, 2) | 0.319588 | 0.306667 | 0.233333 | 0.202381 | 0.117207 |
| g(9, 3) | 0.051546 | 0.053333 | 0 | 0.02381 | 0.053333 |
| g(9, 4) | 0.041237 | 0.026667 | 0.066667 | 0.059524 | 0.04 |
| g(9, 5) | 0.154639 | 0.16 | 0.166667 | 0.142857 | 0.02381 |
| g(9, 6) | 0 | 0 | 0.033333 | 0 | 0.033333 |
| g(9, 7) | 0.051546 | 0.066667 | 0.133333 | 0.071429 | 0.081787 |
| g(9, 8) | 0.010309 | 0.066667 | 0 | 0.059524 | 0.066667 |
| g(9, 9) | 0.061856 | 0.066667 | 0.166667 | 0.071429 | 0.104811 |
| g(9, 10) | 0 | 0.013333 | 0 | 0.02381 | 0.02381 |
| g(9, 11) | 0.030928 | 0.013333 | 0 | 0.047619 | 0.047619 |
| g(10, 1) | 0.412371 | 0.373333 | 0.433333 | 0.369048 | 0.064286 |
| g(10, 2) | 0.206186 | 0.24 | 0.266667 | 0.25 | 0.060481 |
| g(10, 3) | 0.195876 | 0.24 | 0.166667 | 0.059524 | 0.180476 |
| g(10, 4) | 0.030928 | 0.013333 | 0 | 0.011905 | 0.030928 |
| g(10, 5) | 0 | 0.013333 | 0.033333 | 0.047619 | 0.047619 |
| g(10, 6) | 0.051546 | 0.026667 | 0.1 | 0.059524 | 0.073333 |
| g(10, 7) | 0.020619 | 0.013333 | 0 | 0.02381 | 0.02381 |
| g(10, 8) | 0.010309 | 0.053333 | 0.066667 | 0.107143 | 0.096834 |
| g(10, 9) | 0.010309 | 0 | 0 | 0 | 0.010309 |
| g(10, 10) | 0.010309 | 0 | 0 | 0 | 0.010309 |
| g(10, 11) | 0.041237 | 0.013333 | 0 | 0.047619 | 0.047619 |
| g(10, 12) | 0.0103090 | 0 | 0 | 0 | 0.010309 |

[0774] TABLE 16-2

| genotype | blue | green | hazel | brown | range |
|---|---|---|---|---|---|
| g(1, 1) | 0.56701 | 0.386667 | 0.366667 | 0.511905 | 0.200344 |
| g(1, 2) | 0.14433 | 0.226667 | 0.233333 | 0.166667 | 0.089003 |
| g(1, 3) | 0.041237 | 0.013333 | 0 | 0 | 0.041237 |
| g(1, 4) | 0.051546 | 0.013333 | 0.033333 | 0.02381 | 0.038213 |
| g(1, 5) | 0.103093 | 0.12 | 0.166667 | 0.166667 | 0.063574 |
| g(1, 6) | 0 | 0.026667 | 0 | 0 | 0.026667 |
| g(1, 7) | 0.010309 | 0 | 0 | 0 | 0.010309 |
| g(1, 8) | 0.010309 | 0.026667 | 0 | 0 | 0.026667 |
| g(1, 9) | 0.020619 | 0.066667 | 0.133333 | 0 | 0.133333 |
| g(1, 10) | 0.010309 | 0.053333 | 0 | 0.02381 | 0.053333 |
| g(1, 11) | 0 | 0 | 0 | 0.011905 | 0.011905 |
| g(1, 12) | 0.010309 | 0.026667 | 0.1 | 0.059524 | 0.089691 |
| g(1, 13) | 0.010309 | 0 | 0.033333 | 0 | 0.033333 |
| g(1, 14) | 0 | 0.013333 | 0 | 0 | 0.013333 |
| g(1, 15) | 0.010309 | 0 | 0 | 0 | 0.010309 |
| g(1, 16) | 0 | 0.013333 | 0 | 0 | 0.013333 |
| g(1, 17) | 0 | 0 | 0 | 0.011905 | 0.011905 |
| g(1, 18) | 0.010309 | 0 | 0 | 0 | 0.010309 |
| g(2, 1) | 0.371134 | 0.306667 | 0.3 | 0.416667 | 0.116667 |
| g(2, 2) | 0.164948 | 0.186667 | 0.133333 | 0.154762 | 0.053333 |
| g(2, 3) | 0.319588 | 0.226667 | 0.233333 | 0.154762 | 0.164826 |
| g(2, 4) | 0.030928 | 0.026667 | 0.033333 | 0.071429 | 0.044762 |
| g(2, 5) | 0 | 0 | 0 | 0.02381 | 0.02381 |
| g(2, 6) | 0.051546 | 0.106667 | 0.166667 | 0.047619 | 0.119048 |
| g(2, 7) | 0.010309 | 0.04 | 0 | 0.02381 | 0.04 |
| g(2, 8) | 0 | 0 | 0.033333 | 0 | 0.033333 |
| g(2, 9) | 0.041237 | 0.026667 | 0.066667 | 0.035714 | 0.04 |
| g(2, 10) | 0.010309 | 0.04 | 0.033333 | 0 | 0.04 |
| g(2, 11) | 0 | 0.04 | 0.033333 | 0.011905 | 0.04 |
| g(2, 12) | 0 | 0 | 0.033333 | 0.011905 | 0.033333 |
| g(3, 1) | 0.701031 | 0.6 | 0.4 | 0.52381 | 0.301031 |
| g(3, 2) | 0.154639 | 0.12 | 0.266667 | 0.202381 | 0.146667 |
| g(3, 3) | 0.041237 | 0.053333 | 0.033333 | 0.011905 | 0.041429 |
| g(3, 4) | 0.092784 | 0.106667 | 0.166667 | 0.059524 | 0.107143 |
| g(3, 5) | 0 | 0 | 0.033333 | 0 | 0.033333 |
| g(3, 6) | 0 | 0.066667 | 0.033333 | 0.083333 | 0.083333 |
| g(3, 7) | 0 | 0.026667 | 0 | 0.02381 | 0.026667 |
| g(3, 8) | 0 | 0 | 0.066667 | 0.02381 | 0.066667 |
| g(3, 9) | 0 | 0.026667 | 0 | 0 | 0.026667 |
| g(3, 10) | 0 | 0 | 0.033333 | 0 | 0.033333 |
| g(3, 11) | 0 | 0 | 0 | 0.035714 | 0.035714 |
| g(3, 12) | 0 | 0 | 0 | 0.011905 | 0.011905 |
| g(3, 13) | 0.010309 | 0 | 0 | 0 | 0.010309 |
| g(4, 1) | 0.371134 | 0.253333 | 0.433333 | 0.404762 | 0.18 |
| g(4, 2) | 0.453608 | 0.44 | 0.366667 | 0.369048 | 0.086942 |
| g(4, 3) | 0.010309 | 0.013333 | 0.033333 | 0.035714 | 0.025405 |
| g(4, 4) | 0.010309 | 0.013333 | 0 | 0 | 0.013333 |
| g(4, 5) | 0.113402 | 0.226667 | 0.166667 | 0.095238 | 0.131429 |
| g(4, 6) | 0.041237 | 0.026667 | 0.033333 | 0.059524 | 0.032857 |
| g(4, 7) | 0 | 0.013333 | 0 | 0 | 0.013333 |
| g(4, 8) | 0 | 0 | 0 | 0.011905 | 0.011905 |
| g(5, 1) | 0.608247 | 0.453333 | 0.533333 | 0.547619 | 0.154914 |
| g(5, 2) | 0.092784 | 0.186667 | 0.166667 | 0.107143 | 0.093883 |
| g(5, 3) | 0.134021 | 0.173333 | 0.066667 | 0.142857 | 0.106667 |
| g(5, 4) | 0.14433 | 0.12 | 0.2 | 0.083333 | 0.116667 |
| g(5, 5) | 0.010309 | 0 | 0.033333 | 0.011905 | 0.033333 |
| g(5, 6) | 0 | 0.013333 | 0 | 0 | 0.013333 |
| g(5, 7) | 0 | 0.026667 | 0.033333 | 0 | 0.033333 |
| g(5, 7) | 0.010309 | 0.013333 | 0 | 0.011905 | 0.013333 |
| g(5, 8) | 0 | 0.013333 | 0.033333 | 0.035714 | 0.035714 |
| g(5, 9) | 0 | 0 | 0 | 0.011905 | 0.011905 |
| g(5, 10) | 0 | 0 | 0 | 0.011905 | 0.011905 |
| g(6, 1) | 0.56701 | 0.533333 | 0.5 | 0.607143 | 0.107143 |
| g(6, 2) | 0.134021 | 0.08 | 0.266667 | 0.119048 | 0.186667 |
| g(6, 3) | 0.113402 | 0.186667 | 0.1 | 0.119048 | 0.086667 |
| g(6, 4) | 0.164948 | 0.133333 | 0.2 | 0.095238 | 0.104762 |
| g(6, 5) | 0.010309 | 0.026667 | 0 | 0.011905 | 0.026667 |
| g(6, 6) | 0 | 0.026667 | 0 | 0.011905 | 0.026667 |
| g(6, 7) | 0.010309 | 0.013333 | 0 | 0 | 0.013333 |
| g(7, 1) | 0.030928 | 0.12 | 0.133333 | 0.130952 | 0.102405 |
| g(7, 2) | 0.309278 | 0.253333 | 0.166667 | 0.321429 | 0.154762 |
| g(7, 3) | 0.247423 | 0.266667 | 0.133333 | 0.214286 | 0.133333 |
| g(7, 4) | 0.010309 | 0 | 0.066667 | 0 | 0.066667 |
| g(7, 5) | 0.247423 | 0.16 | 0.233333 | 0.095238 | 0.152185 |
| g(7, 6) | 0.030928 | 0.013333 | 0.1 | 0.011905 | 0.088095 |
| g(7, 7) | 0.010309 | 0.026667 | 0.033333 | 0.011905 | 0.023024 |
| g(7, 8) | 0.103093 | 0.12 | 0.133333 | 0.142857 | 0.039764 |
| g(7, 9) | 0.010309 | 0.026667 | 0 | 0.02381 | 0.026667 |
| g(7, 10) | 0 | 0 | 0.066667 | 0.011905 | 0.066667 |
| g(8, 1) | 0.402062 | 0.293333 | 0.3 | 0.321429 | 0.108729 |
| g(8, 2) | 0.463918 | 0.466667 | 0.566667 | 0.357143 | 0.209524 |
| g(8, 3) | 0.041237 | 0.053333 | 0.033333 | 0.059524 | 0.02619 |
| g(8, 4) | 0.010309 | 0.013333 | 0 | 0 | 0.013333 |
| g(8, 5) | 0.041237 | 0.106667 | 0.166667 | 0.119048 | 0.12543 |
| g(9, 1) | 0.278351 | 0.213333 | 0.266667 | 0.261905 | 0.065017 |
| g(9, 2) | 0.319588 | 0.306667 | 0.233333 | 0.202381 | 0.117207 |
| g(9, 3) | 0.051546 | 0.053333 | 0 | 0.02381 | 0.053333 |
| g(9, 4) | 0.041237 | 0.026667 | 0.066667 | 0.059524 | 0.04 |
| g(9, 5) | 0.154639 | 0.16 | 0.166667 | 0.142857 | 0.02381 |
| g(9, 6) | 0 | 0 | 0.033333 | 0 | 0.033333 |
| g(9, 7) | 0.051546 | 0.066667 | 0.133333 | 0.071429 | 0.081787 |
| g(9, 8) | 0.010309 | 0.066667 | 0 | 0.059524 | 0.066667 |
| g(9, 9) | 0.061856 | 0.066667 | 0.166667 | 0.071429 | 0.104811 |
| g(9, 10) | 0 | 0.013333 | 0 | 0.02381 | 0.02381 |
| g(9, 11) | 0.030928 | 0.013333 | 0 | 0.047619 | 0.047619 |
| g(10, 1) | 0.412371 | 0.373333 | 0.433333 | 0.369048 | 0.064286 |
| g(10, 2) | 0.206186 | 0.24 | 0.266667 | 0.25 | 0.060481 |
| g(10, 3) | 0.195876 | 0.24 | 0.166667 | 0.059524 | 0.180476 |
| g(10, 4) | 0.030928 | 0.013333 | 0 | 0.011905 | 0.030928 |
| g(10, 5) | 0 | 0.013333 | 0.033333 | 0.047619 | 0.047619 |
| g(10, 6) | 0.051546 | 0.026667 | 0.1 | 0.059524 | 0.073333 |
| g(10, 7) | 0.020619 | 0.013333 | 0 | 0.02381 | 0.02381 |
| g(10, 8) | 0.010309 | 0.053333 | 0.066667 | 0.107143 | 0.096834 |
| g(10, 9) | 0.010309 | 0 | 0 | 0 | 0.010309 |
| g(10, 10) | 0.010309 | 0 | 0 | 0 | 0.010309 |
| g(10, 11) | 0.041237 | 0.013333 | 0 | 0.047619 | 0.047619 |
| g(10, 12) | 0.010309 | 0 | 0 | 0 | 0.010309 |

[0775] TABLE 16-3
Coding Key

OCA2-A
g(1,1) TTAA/TTAA
g(1,2) CCAG/TTAA
OCA2-B
g(2,1) CAA/CAA
g(2,3) CGA/CAA
OCA2-C
g(1,3) GGAA/GGAA
g(2,3) GGAA/TGAA
OCA2-D
g(4,1) AGG/AGG
g(4,2) GGG/AGG
OCA2-E
g(5,1) ACG/ACG
g(5,4) GCT/ACG
MC1R-A
g(6,2) CCC/CTC
g(61) CCC/CCC
TYR-A
g(7,2) CGG/CAG
g(7,5) AGG/CAG
TYRP-A
g(8,2) CC/TC
g(8,1) TC/TC
TYRP-B
g(9,2) TTG/GAG
g(9,1) TTG/TTG
DCT-B
g(10,3) CTG/GCA

### EXAMPLE 17

### Identification of Penetrant and Latent Haplotype Alleles and Construction of an Accurate Complex Classifier Model for Eye Color Inference

[0776] This example provides the identification of a preferred combination of penetrant and latent haplotype alleles (also called genetic features herein) that are used in a complex classifier model to infer eye color. These results reveal that the identification of predictive markers for complex traits such as iris pigmentation is best accomplished in a manner that is respectful of intergenic complexity and that accurate classification models incorporating genetic features are best developed in a mariner that is respectful of intragenic complexity. The combination of penetrant and latent haplotypes of this Example when used to infer eye color using the classification model disclosed in this Example, inferred eye shade for a group of 225 Caucasians with 99% accuracy for the inference of iris color shade, and 97% accuracy for the inference of actual eye colors.

[0777] Iris pigmentation is a complex genetic trait that has long interested geneticists and anthropologists but is yet to be completely understood. A novel population genetics approach was applied to identify the penetrant “genetic features” of variable human iris pigmentation. As described in this example, latent genetic features were identified through inference, and both types of features were modeled using a weighted quadratic discrimination method to develop a complex genetics classifier for the accurate inference of iris colors. The results provided in this Example show that of thousands of possible allele combinations in several human pigmentation genes, only 12 within eight of these genes are necessary for the accurate and sensitive inference of human iris color.

A. Methods

Specimens

[0778] Specimens for re-sequencing were obtained from the Cornell Institute in Camden, New Jersey. Specimens for SNP scoring were collected from individuals of various ages, sex, hair, iris and skin shades using informed consent guidelines under IRB guidance. Anonymous unique identifiers were assigned to specimens from which DNA was prepared using standard DNA isolation techniques (Qiagen Inc.).

SNP Discovery

[0779] Vertical resequencing for the various genes was performed by amplifying the proximal promoter, each exon and 3′ UTR sequences from a multiethnic panel of 670 individuals. PCR amplification was accomplished using pfu Turbo polymerase according to the manufacture's guidelines (Stratagene). We developed a program (unpublished) to design re-sequencing primers in a manner respectful of homologous sequences in the genome to insure that we did not co-amplify pseudo genes or amplify from within repeats. BLAST searches confirmed the specificity of all primers used. Amplification products were subcloned into the pTOPO (Invitrogen) sequencing vector and 96 insert positive colonies were grown for plasmid DNA isolation. We sequenced with an ABI3700 with PE Applied Biosystems BDT chemistry and we deposited the sequences into a commercial relational database system (iFINCH, Geospiza, Seattle, Wash.). PHRED qualified sequences were aligned and analyzed using second program we developed (unpublished) to identify quality-validated discrepancies between sequences.

Genotyping

[0780] A first round of PCR was performed on these samples using the high-fidelity DNA polymerase pfu turbo and cognate re-sequencing primers. Representatives of the resulting PCR products were checked on an agarose gel, and firs round PCR product was diluted and then used as template for a second round of PCR incorporating phosphothionated primers. Genotyping was performed for individual DNA specimens using an Orchid single base primer extension protocol and an SNPstream 25K/JUltra High Throughput (UHT) instrument (Orchid Biosystems, Princeton, N.J.) using primers as described in Table 17-8.

Data Analysis

[0781] Haplotype frequencies were calculated for haplotype i using the function pᵢ=(xᵢ/n), where xᵢ is the number of times that haplotype i was observed and n is the number of patients in the group. For contingency analysis we used a Pearson's test to test the null hypothesis that there was no association between genotypes and eye colors. We also determined and quantified the associations between specific genotypes and eye colors by computing the Adjusted Residuals which we assumed to follow an N(0,1) distribution as per large sample theory. We defined the 95% confidence intervals by carrying out Multiple Logistic Regression Analysis; it may be noted that estimates of conditional probabilities and their 95% confidence intervals obtained using this approach would be more stable compared to sample proportions, in the sense that the standard error and confidence intervals would be smaller being based on total sample size (n), rather than cell frequencies (nᵢⱼ). Individual haplotypes were inferred from phase unknown genotypes using a computational haplotype reconstruction method (Stephens and Donnelly, 2001).

Genetic Feature Extraction

[0782] To identify useful genetic features of variable iris color, an iterative, empirical approach was used to test haplotype alleles of all possible SNP combinations within each gene for the ability to statistically resolve individuals of various trait values. The goal of the screen was to identify whether alleles of a gene were associated with variable iris color and if so, which SNP combinations had alleles most strongly associated with iris color. We designate the predictive phase-known alleles of these SNP combinations as “genetic features” of variable iris color. We designate the SNP combinations themselves as “feature SNP combinations”.

[0783] For each gene, a list of all possible n-locus SNP combinations was created. The system iteratively
[0784] a) selected an n-locus SNP combination at random,
[0785] b) inferred haplotype phase for each individual with respect to this n-SNP combination (if n>2, using the algorithm described by Stephens and Donnelly, 2001),
[0786] c) counted the inferred haplotype pairs for the light and dark group,
[0787] d) calculated a pair-wise F-statistic, and Fishers Exact test statistic on haplotype pairs (“multilocus genotypes”) and a Chi-square adjusted residual statistic on individual haplotypes, in order to determine whether there were significant allele differences between individuals of light (blue+green+hazel irises) and dark (black+brown) iris shade and
[0788] e) repeated the process for the next n-locus SNP combination until all possible combinations within a gene were tested.

[0789] The process was repeated for each gene. SNPs or SNP combinations with alleles that were statistically associated with iris color shade (p-value<0.05) were identified as “feature SNP combinations” and/or their alleles with significant adjusted residuals as “genetic features” of variable iris color. To avoid having to test all possible n-SNP combinations (which is computationally intensive), we first tested all possible 2-SNP haplotypes and used these results to guide subsequent tests of higher order SNP combinations. When more than one “genetic feature” was identified within a gene (i.e., in the case of overlapping SNP sets), the set of non-overlapping SNP combinations with the lowest (and significant) p-values within the gene was selected. In the case of multiple non-overlapping features identified within a gene, it was often observed that genotype trait class sample sizes and allelic complexity rendered the alleles of a single (n+m+ . . . )-locus SNP combination less robustly associated with trait value than the component (n-locus, m-locus) combinations on their own. In these cases, each of the (n, m, . . . ) combinations was selected as a “genetic feature” over the single (n+m+ . . . ) feature.

Nested Contingency Analysis.

[0790] To verify and validate the genetic features that were identified, a nested contingency analysis of haplotype cladograms was performed. To do this, an assumption was made that both detected and non-detected mutations were potential contributors for phenotypic effects at some point in the evolutionary history of a population, and that these mutations were embedded within the historical structure represented by the haplotype cladogram. Clades were obtained by using PAUP Ver. 4.0b8 software (Outgroup method or Neighbor Joining (NJ) method). We obtained nested cladograms based on each of the following four methods: (i) Maximum Parsimony, (ii) Neighbor joining, (iii) Maximum Likelihood and (iv) Bayes Method. In general, we used the tree for which nested statistical analysis gave the best results. Nested contingency analysis was carried out as described by others (Templeton et al., slipra, 1997).

Genetic Feature Modeling—Quadratic Classification:

[0791] To use the haplotype alleles for the inference of iris colors, we wrote a software program for using a parametric, multivariate Quadratic classification technique with modifications for genomics data. Under the assumption that the samples have been taken from multivariate normal distributions with different mean vectors, with a common variance covariance matrix, we applied classification procedures introduced previously by Fisher (1936), Rao (Nature 1947: 159:30-31; Rao, C. R., Nature 1948a; 160:835-836; Rao, C. R., JRSS(B) 10:159-203) and Smith (1947). The pooled within-population variance-covariance matrix can be computed from
S=Σ^{p}ᵢ₌₁Σ^{Ni}ⱼ₌₁(Yᵢⱼ−μᵢ)(Yᵢⱼ−μᵢ)′/ΣNᵢ−1) (1)
where Yᵢⱼ is the vector of character measurements for the j'th individual in the i'th group and μᵢ and Nᵢ are the vector of means and sample size for the i'th group. The components for these vectors are encodings for entities such as SNP alleles, haplotypes (genetic features) or in the preferred case, diploid pairs of haplotypes (multilocus genotypes of genetic features), each dimension of the vector representing a score for the different entity observed in the sample. Because the total number of genotypes observed for the genetic problem described herein exceed the total number of individuals in any one iris color group, we do not use Fisher's quadratic discriminate analysis directly because of variance-covariance matrix singularity. Instead, we form a contingency table K=(kᵢⱼ) of order Ni×Nj, where rows i represents multilocus genotypes and columns j represent iris colors (i={1, 2,. . . , Ni} and j={1, 2, . . . , Nj}). We computed the marginal column, k(i)=Σ{k(ij)|jεJ, the marginal row, k(i)=Σ{k(ij)|jεI and grand total of k=Σ{k(ij)|iεI and jεJ . After computing the mass of the i^{th} row, fᵢ=k(i)/k, and the mass of j^{th} column, fⱼ=k(j)/k, we computed the i^{th} row and j^{th} column profile of the correspondence matrix (fᵢⱼ)=(kᵢⱼ/k) using the functions fⁱ_{J}={fⁱⱼ=kᵢⱼ/k(i)|jεJ} and f^{j}_{I}={f^{j}ᵢ=kᵢⱼ/k(j)|iεI}, respectively. We then computed the difference of observed and expected frequencies of the (ij)^{th} cell, dᵢⱼ=(fᵢⱼ−fᵢfⱼ). The principal inertia (Eigenvalue) was computed as follows: Let the scaled matrix be defined as S=(sᵢⱼ), where sᵢⱼ=dᵢⱼ/(√fᵢfⱼ). S=(sᵢⱼ) is submitted to singular value decomposition (SVD) by breaking the matrix into the product of three matrices:
S=UΛV^{T} (1)
where Λ is a diagonal matrix, and its diagonal elements are referred to as the singular values of S, or factors, and U is the left eigenvector which represents eigengenotypes by rows and V^{T} is the right eigenvector which represents eigentraits by columns. Thus, all of the eigentraits are decoupled from all of the eigengenotypes. Principal Coordinates were computed for the i^{th} row coordinate of k^{th} factor using the function F_{κ}(i)=λ_{κ}u_{iκ}/√fᵢ for k=1, 2, . . . , NF, where u_{iκ} is the left eigengenotype of the i^{th} row coordinate of the k^{th} factor. Similarly, principal components were computed for the j^{th} column coordinate of k^{th} factor using G_{κ}(j)=λ_{κ}v_{jκ}/√fⱼ, for κ=1, 2, . . . , NF=Min(r−1, c−1), where v_{jκ} is the right eigentrait of the j^{th} column coordinate of k^{th} factor. The i^{th} row score of the k^{th} factor is obtained by sₖ(i)=Σ{Gₖ(j)kᵢⱼ|jε1J. Similarly, the j^{th} column score is computed by cₖ(j)=Σ{Fₖ(i)kᵢⱼ|iεI. The Z-score of the i^{th} genotype of the k^{th} factor is given by Zᵢₖ={sₖ(i)−E(sₖ)}/SD{sₖ(i)}, where E(sₖ) is the mean score of genotypes of the k^{th} factor and SD[sₖ(i)] is the standard deviation of the genotype score of the k^{th} factor. Finally, individual sample scores are obtained for each genetic feature for all factors as M=XZ, where X=(xᵢⱼ)={1 if the i^{th} individual has the j^{th} genotype and 0 otherwise. The correspondence analysis in this case serves as an effective dimension reduction tool; it is with these sample scores on each genetic feature for each factor that we encode multilocus genotypes for quadratic discriminate analysis. An individual vector Y=(i, j, . . . n)ₘ, where n=number of multilocus genotypes for m genetic features before correspondence analysis now becomes a simpler Y={(x)ₘ, (y)ₘ, (z)ₘ} vector by encoding the individuals on m genetic features for factors x,y and z. It is these vectors that we use with quadratic discriminate analysis. Assuming that the iris color populations present different variance-covariance matrices with these encodings, as they did in this case, the estimate of the quadratic discriminate score for the i^{th} group is:
Dᵢ^{Q}=−(½)ln/Sᵢ/−(Y−μᵢ)′S⁻¹ᵢ(Y−μᵢ)+lnpᵢ for i=1, 2, . . . g(groups) (2)
Where μᵢ is the sample mean of the i^{th} group and Sᵢ is the new sample variance-covariance matrix of the i^{th} group calculated as in (1) but using sample scores, and pᵢ=1/g. Large between class distances, relative to within class differences, provide justification for using the mean vector values for each class as a basis for classification. Classification is accomplished by allocating the individual to that group for which (2) is largest, where the probability p(j|x) of j^{th} membership in each iris color class is calculated as:
P(j|x)=exp[−0.5 D²ⱼ(y)]/Σᵢexp[−0.5 D²ᵢ(y)] for i=1, 2, . . . g(groups) (3)
where,
Dⱼ²(Y)=(Y−μᵢ)′Sⱼ⁻¹(Y−μᵢ) (4)

[0792] The P(j|x) applies to the classification of individuals used for the construction of S, but generalize S derived from one group by blindly classifying individuals of a second group to construct a classification probability table of individuals of known iris color by classified iris color groups.

[0793] Under the assumption of normality, the sample mean vector and the sample covariance matrix constitute minimally sufficient statistics, in the sense that any inference based of them carries with it all the information available in the sample. Thus, any classification rule based on these summary statistics ought to be optimal from the point of view of sample information used for their analysis. However, with complex systems, the data often provide additional information not reflected by these statistics, and this additional information can often be used for improving the results based on these statistics. With genetics, sequences may contribute towards phenotype variation through dominance or additivity, wherein their associations with trait values from independent analyses are of varying degrees of strength, but statistically significant. Alternatively, sequences may contribute through epistasis, wherein their association with trait values from independent analyses are weak or non-existent. To produce a quadratic classifier sensitive for the epistatic contributions, we devised a weighting scheme for producing unequal variance-covariance matrices for each of the iris color groups used in quadratic analysis. First the most strongly associated genotypes were identified. Next, genotypes of weaker association were randomly selected. Normally when constructing the covariance matrix, M for each factor was calculated using the Z-scores and binary values; a value of 0 within the individual vector if the genotype was absent in an individual, and a 1 if present. Using the weighting scheme, instead of using a binary x when calculating M for each factor, 1+x was used for randomly selected weakly/non-associated sequences, where x is the number of strongly associated genotypes also present in that individual. By successively selecting random combinations of weakly/non-associated pigmentation gene features for weighting and testing how well the model derived from these combinations generalizes to the test sample for iris color classification, an optimal weighting strategy can be obtained. Recoding in this manner generally increases the variability of the scores of weakly/non-associated sequences and hence it improves the discriminating power of the model. Although the coding procedure may seem arbitrary, it is important from a practical point of view. For example, there are instances in the areas of statistical forecasting of time series or economics, wherein a data supported methods are recommended, as long as they lead to relatively more accurate inferences. In this case, once the optimal model has been identified, the weighting used for its generation can provide clues on the non-linear relationships between genotypes of different genes towards complex trait variation (i.e., epistasis).

Quadratic Classifier Simulation

[0794] Monte Carlo simulation study was used to generate the distribution and summary statistics for the probabilities of correct and incorrect classifications using the linear/quadratic classification method. A program was written to use a random number generator to select 200 individuals on the basis of observed allele frequencies from both light and dark iris color shade groups, and used these individuals to calculate a multivariate linear classification probability matrix. This experiment was repeated 10,000 times to get the summary statistics of Classification and misclassification rates and their Confidence Intervals.

B. Results

[0795] The public databases (NCBI: Unigene, dbSNP, LocusLink) and literature were mined and re-sequencing was performed to identify 181 candidate SNP loci in 8 pigmentation genes (an average of 23 candidate SNPs per gene) (column 2, Table 1). Genotypes were scored for each of these candidate SNP loci in a group of 335 Caucasians of self-reported iris color (97 brown, 117 blue, 36 green, 85 hazel) as well as in 230 additional individuals of varying racial backgrounds (100 Caucasian, 100 African American and 30 Asian individuals). A software system was developed to screen the phase known alleles of all possible n-SNP combinations for association with trait value (if any, where n=[1,2, . . . x] and x=the number of SNP loci). The screen was carried out in case control format, encoding iris color shade as light or dark (where light=blue, green or hazel and dark=black and brown). In all, we screened alleles of 411 n-locus SNP combinations and of these, alleles of 8 optimally discriminate combinations in 4 of the genes were identified as strongly associated with variable Caucasian iris color (Column 5, Table 17-1). The combinations were unequally distributed among the OCA2 (n=5), TYRP1 (n=1), DCT (n=1) and MC1R (n=1) genes: Because their association with iris colors was strong enough to be detected with simple genetics approaches, we term haplotype alleles of these SNP combinations “penetrant genetic features,” and the SNP combinations themselves “penetrant feature SNP combinations” of variable iris color. No penetrant genetic features or penetrant SNP combinations were identified in the TYR, SILV, ASIP or AP3B1 genes (Column 5, Table 17-1). The 8 penetrant genetic features were comprised of 25 SNPs, of an average minor allele frequency 0.21 (range 0.07-0.47). Four of these were coding changes, 17 were located in introns and 4 were silent changes (Column 6, Table 17-2). Ten of the SNPs were identified from resequencing (not present in the NCBI:dbSNP database or the literature) though alleles of two of these (217439 and 217441, Table 2) turned out to have been identified before as related to human pigmentation in the literature (specifically red hair and blue eyes, Valverde, P. et al., Nature Genet. 11: 328-330, 1995). 11 of the SNPs were selected from the NCBI dbSNP database (Column 7, Table 17-2).

Validation of the Penetrant Genetic Features:

[0796] Having identified several penetrant feature SNP combinations of variable iris color shade, the analysis was extended to more completely investigate the associations of their penetrant genetic features with specific eye colors. From a contingency analysis of haplotypes and multilocus genotypes versus iris colors (blue, green, hazel, brown and black), numerous significantly associated alleles and allele combinations were associated (Table 17-3). Chi-square adjusted residuals showed that many of the associations were quite strong at the haplotype level. For example, the OCA2-A TTAA was strongly associated with blue (p=0.0079, row 3, column 3, Table 17-3), but the OCA2-A CCAG and OCA2-B CGA alleles were strongly associated with brown (p=0.0008, row 4, column 3, Table 3; p=0.0024, row 11, column 3, Table 3, respectively). Analysis at the level of the multilocus genotypes showed that each of the penetrant genetic feature SNP combinations were also statistically associated with eye colors (i.e., none of the 8 SNP combination is missing an entry in column 8, Table 17-3). Though their alleles were associated with iris color shades, the chi-square statistic of contingency analysis for haplotype or multilocus alleles of the DCT-B, TYR-A, OCA2-D and OCA2-E features were not significant. For example, the DCT-B total p-value was insignificant at the haplotype (row 21, column 3, 8 Table 17-3) and multilocus genotype levels (row 21, column 8, Table 17-3). Nonetheless, adjusted residuals for 2 of the DCT-B haplotypes show that these particular alleles were strongly associated with eye colors even though the total chi-square statistic was not significant (CTG with brown, p=0.0133, row 17, column 3, Table 3 and GTG with hazel, p=0.0249, row 18, column 3, Table 17-3). The same was observed for other feature SNP combinations that were not associated with specific iris colors but were associated with iris color shade; the OCA2-D AGG genetic feature with Hazel irises (p=0.0468, row 27, column 3, Table 17-3), the OCA2-D GGG genetic feature with brown irises (p=0.0222, row 28, column 3, Table 17-3) and the OCA2-E GCA genetic feature with brown irises (p=0.0004, row 31, column 3, Table 17-3). Given sample size and association strength, the most important genetic features for predicting brown irises were found in the OCA2-D, OCA2-E and DCT-B feature SNP combinations, and the most important for blue or green iris colors were found in the MC1R-B and TYRP-B feature SNP combinations (columns 5 and 6, Table 17-3). Even though there were twice as many genetic features of blue irises counted as for brown (1474 vs. 664, counting down columns 6 and 11 for each color, Table 17-3), there were half as many types of genetic features of brown as for blue irises (4 versus 8, counting down column 4 for each color, Table 17-3). This suggests that the diversity of haplotypes associated with brown irises was significantly greater than that of the haplotypes associated with blue irises. Most of the haplotypes and multilocus genotypes for the feature combinations were even more dramatically associated with eye colors in a multi-racial sample (data not shown), presumably because the variants associated with darker irises were enriched in those racial groups of the world that are of darker average iris color than Caucasians.

[0797] The associations at the level of the multilocus genotypes for these penetrant genetic features suggest that some of the haplotype alleles contribute towards the dominance component of iris color variance. For example, though the OCA2-A TTAA haplotype is strongly associated with blue irises (p=0.0079, row 3, column 3, Table 17-3) and the OCA2-A TTAG haplotype is strongly associated with brown irises (p=0.0045, row 5, column 3, Table 17-3), the OCA2-A TTAA/TTAG multilocus genotype was strongly associated with brown irises, not blue (p=0.0006, row 5, column 8, Table 17-3). Not all of the dominance component contributions were towards darker eye colors. For example, OCA2-B CAA was strongly associated with blue irises (p=0.0269, row 10, column 3, Table 17-3) and OCA2-B CGA with brown irises (p=0.0024, row 11, column 3, Table 17-3) but the OCA2-B CAA/CGA multilocus genotype was associated with blue, not brown irises (p=0.0.0314, row 11, column 8, Table 17-3).

[0798] A contingency table was constructed and the multilocus genotypes were plotted in Correspondence Analysis space to visualize the lower-dimensional interrelationships and between multilocus genotypes of the penetrant genetic features and iris colors, as well as to encode individuals as complex genetics vectors. From this analysis, it was clear that genotypes of penetrant genetic features of Blue, Green and Hazel irises share more profile similarity to one another than to those of brown irises. A plot of genotypes and trait values that are truly related to one another would produce a plot pattern that makes intuitive biological sense. In the COA plot, blue, green, hazel and brown irises plotted as profile functions of genetic feature genotypes are found along a clockwise progression around the centroid. This is the order in which the concentrations of brown pigment (eumelanin) increases. Because the genes measured in this analysis are involved in the production of this pigment, this pattern makes intuitive sense since. Further, the multilocus genotypes of the penetrant feature SNP combinations were more distantly removed from the centroid than genotypes of combinations that were not as significantly associated (Table 3). This was to be expected since the distance from the centroid is proportional to the contribution of a genotype towards the overall chi-square statistic in the original contingency table.

[0799] To confirm our results and determine the role of specific mutations in the determination of eye color variation we performed a nested contingency analysis on haplotype cladograms of the penetrant feature SNP combinations (Templeton et al., 1987). Haplotype cladograms of all genetic features are inlaid with variants that are functionally interconnected through evolutionary time. The evolutionary framework will often ascribe patterns to present day trait associations that are derived from the evolutionary history of the alleles and in so doing, may suggest a biological, not merely statistical relevance for a genetic association. However, failure to find a cladogram based pattern to the allele associations is not necessarily an indication that the allele associations are not real, since functionally relevant alleles may have been recently and independently derived. We identified significant cladogram based pattern for the associations of OCA2-A, OCA2-B, OCA2-C OCA2-D and TYRP-A alleles (Table 4), suggesting that mutations relevant for iris color occurred relatively early in the evolution of these gene sequences. Two of the feature SNP combinations (OCA2-B and OCA2-C) had more than one functionally relevant mutation with a discernable evolutionary history, but for most of the others, the largest amount (though not all) of the variability in iris colors could be traced back to branchings created by change at a single locus of the feature combination. No significant cladogram based pattern was detected for the MC1R-A, OCA2-E or DCT-B feature SNP combinations. For these, it appears that the alleles associated with iris color have independently evolved at a time later in the evolutionary history of their gene sequences than for the OCA2-A, OCA2-B, OCA2-C OCA2-D and TYRP-A alleles.

Latent Genetic Features

[0800] Because the prevalence of each iris color trait was relatively high in our sample group as well as in the general population, and because the allele frequencies of most of the SNPs we studied was also relatively high, the habitability of iris colors would be expected to be reasonable for the detection of SNP associations within the context of a case-control study design (Culverhouse et al., Am. J. Hum. Genet. 70:461-471, 2002). Nonetheless, a major drawback of the genome based case control study design (given the analytical methods that we have so far employed) is the lack of power to detect alleles that exclusively or substantially contribute towards genetic variance through the epistatic component (Culverhouse et al., Am. J. Hum. Genet. 70:461-471, 2002). SNPs that were not part of the penetrant feature SNP combinations described in Table 1 may either not contribute towards iris color variance, or may contribute through epistatic means. Though undetectable with the case-control design, epistatic components can more easily be detected in linkage studies than in case control studies because purely (or largely) epistatic models give rise to excess allele sharing among affected sibs in linkage analysis. We reasoned that a racial comparison of pigmentation allele frequencies between Caucasians and Africans/Asians represent an extreme case of a very simple linkage study, where the racial groups are equivalent to sibs of a family pedigree. In this case, the linkage is considered within the context of an evolutionary, rather than familial scale, because individuals of the latter two races exhibit darker average iris color than Caucasians. Thus, to identify those SNPs that may contribute towards the epistatic component of iris color variance, we screened the SNPs that were not part of the penetrant feature SNP combinations described in Table 1 for alleles that were enriched in either Caucasians (n=100 new individuals, not yet analyzed) or the African/Asian combined (n=130 new individuals, not yet analyzed) groups. Though most alleles in non-pigmentation genes do not show dramatic minor allele frequency differences between the two racial groups (Frudakis et al., In Review, Human Heredity (2002); for example, Table 5B), alleles of many of the SNPs not part of the penetrant feature SNP combinations of Table 1 show unusual minor allele frequency differences between the two racial groups (Table 5A). We inferred that these differently shared SNP alleles may contribute towards the epistatic component of iris color variance. Though haplotype alleles are generally more predictive for trait value than individual SNP alleles, it is not possible to determine which alleles of which of these SNP combinations contribute most towards this variance. Thus, we combined them into arbitrary SNP combinations, the components of which were in linkage disequilibrium, and we call these “latent feature SNP combinations” of variable iris colors and their haplotype (and multilocus genotype) alleles “latent genetic features” of variable iris color.

Feature Modeling and Classifier Construction

[0801] Using the penetrant genetic features as independent classifiers, Bayesian posterior probabilities of correct classification approached 50% for some, but fell within the 30%-40% range for most (columns 5 and 10, Table 3). These results imply that the determination of variable iris colors is complex and suggest that though the alleles of the penetrant feature SNP combinations are associated with iris color variance, any one component on its own explains but a minor fraction of this variance and it's predictive power as an independent classifier is too low for field use.

Weighted Quadratic Classification Using Only the Penetrant Genetic Features

[0802] To generate a complex model by which to explain more iris color variance, to an extent that accurate inferences could be made, a weighted quadratic classification algorithm was developed based on standard coordinates from a correspondence analysis (see methods). We first used the penetrant genetic features to compute and weight a variance-covariance matrix (see methods) from 330 Caucasian individuals. This matrix was applied for a blind, quadratic discriminate classification of iris colors in 286 other Caucasians of known but concealed iris color. For the first analysis two groups were defined; a light iris shade group defined as individuals of blue, green or hazel irises, and the dark iris shade group defined as individuals of brown or black irises. On the level of the multilocus genotypes (gene-wise genotypes), an overall accuracy of 98% was obtained for this discrimination. The sensitivity for dark iris color shades was 100% and the sensitivity for light eye color shades was 97% (reading along the rows, Table 6a). The light iris classification was 100% accurate and the dark iris classification was 94% accurate (reading down the columns, Table 6b). Using this method at the level of individual SNP alleles, SNP genotypes or individual haplotype alleles produced lower accuracies (with accuracies in increasing order), suggesting that the highest level of intra-genic allele complexity is required for accurate inference of eye color shade and that increasing levels of complexity offer successively greater predictive power. Using the method with multilocus genotypes to infer actual eye colors, rather than just eye color shade, 100% sensitivity was obtained for blue iris classification, 69% sensitivity of brown iris classification, 100% sensitivity of green iris classification and 84% sensitivity of hazel iris classification (reading along rows, Table 6B). The accuracy of blue iris classification was 67%, of brown iris classification 100%, of green iris classification 100% and of hazel iris classification 74% (reading down the columns, Table 6B). Using simulation to estimate the inference power of the quadratic classifier we obtained a log likelihood of r=1.96 (not shown). In effect, the classifier was remarkably accurate and sensitive, with good inference power, but its deficiency was apparent in the misclassification of brown and hazel iris individuals into the blue iris group.

[0803] By adding the latent genetic features to this analysis (latent+penetrant genetic features), the optimal weighting strategy produced a covariance matrix that blindly generalized to the same 286 Caucasians with 100% accuracy and sensitivity for discrimination of light versus dark iris color shades. The optimal model also generalized to this sample with 100% accuracy for the inference of actual iris colors (286/286 correctly classified; along diagonal of Table 7A). Using simulation to estimate inference power of the quadratic classifier, we obtained a log likelihood of r=3.22 for classification into the proper iris color group. Though it is true that markers over-represented in racial groups of average darker iris colors would help the classifier artificially infer eye color in a multi racial sample, it is not true that any such markers would help with the inference of iris colors in Caucasians unless they were functionally relevant for human iris coloration. That these markers contributed towards the classifications within Caucasians suggests that they are functionally related to, or linked to markers functionally related to iris color determination.

C. Discussion

[0804] A complex classifier is presented in this Example for the inference of human iris color from DNA. To our knowledge this is the first such classifier described. Though the pigmentation genes are well documented, until this work, merely a handful of SNP alleles were known to be weakly associated with natural distributions of iris colors in the healthy Caucasian population. The reason for this is that most work attempting to describe natural variation in iris colors has focused on simple genetics approaches, such as single SNP analysis in single genes including the TYR (Sturm et al., Gene 277:49-62, 2001), MC1R (Valverde et al., 1997) and ASIP (Sturm et al., Gene 277:49-62, 2001) genes. By developing new complex genetics methodologies and adopting a systematic approach for identifying and modeling genetic features of variable iris color, we looked at the problem through more of a complex genetics lens than others previously. Nevertheless, most of our results agree with the previous literature. Though the TYR expression product is the rate-limiting step in the catalytic chain leading to the synthesis of eumelanin from tyrosine, previous studies by others have belied the more simple hypothesis that TYR polymorphism is a principle (i.e., penetrant) component underlying normal variation of human pigmentation (Sturm et al., Gene 277:49-62, 2001). The present study also failed to identify penetrant genetic features of variable iris color in the TYR gene. In addition, our systematic approach for identifying penetrant genetic features independently confirmed that the “red hair” SNP alleles described by Valverde et al., Nature Genet. 11:328-330, 1995 and Koppula et al., Hum. Mutat. 9:30-36, 1997 are indeed associated with iris colors. However, our work has extended even these simple gene-wise analyses. While there are no SNPs or haplotypes within the TYR gene associated with iris color, TYR alleles are important within a complex genetics context for the inference of iris colors. While the “red hair” SNPs are indeed associated with natural iris colors (in Irish individuals), they seem to be most strongly associated with Caucasian iris colors within the multilocus context of another coding change in the MC1R gene, and even then, they represent merely one stroke of a larger portrait.

[0805] In fact, one of the most important points to be taken from the work presented herein is that speaking of variable iris color on the level of individual genes is illogical due to the complexity of the trait. The fact of the matter is, neither TYR nor MC1R, nor for that matter any of the other genes we surveyed, are very important for predicting iris colors on their own. This was indicated by the Bayesian conditional probabilities we obtained, which for even the most strongly associated alleles (the penetrant genetic features), were too low for their use as independent classifiers. Since the variance of any complex phenotype is a function of additive, dominance and epistatic genetic variance (in addition to environmental variance) any good complex genetics classifier must capture each of these three components when making inferences, and the classifier we have developed seems to be able to this. The additive component is captured most efficiently through the analysis of multilocus alleles (haplotypes) and the dominance component is captured by expressing individuals as vectors whose components are encodings of multilocus genotypes for each important region. The most innovative advance we have made here is algorithmically capturing the epistatic component. Our work showed that there is a minimal set of 25 penetrant SNPs, of 8 multilocus contexts in 4 genes that are required for minimal inference accuracy. However, a complete set of 57 SNPs, of 19 multilocus contexts (both penetrant and latent), in 7 of the 8 genes is needed for accurate inference. That latent genetic are needed for accurate inference suggests that there is a significant epistatic component to iris color variance in the Caucasian population. The agouti signaling protein (ASIP) harbored four and the silver locus (SILV) harbored three such polymorphisms, each of which was arbitrarily combined into a single latent feature SNP combination. DCT and TYR harbored five and six such polymorphisms, respectively. That no penetrant genetic features were identified in ASIP, SILV or TYR suggests that these genes contribute towards iris color variance largely through epistatic means. The latent features are not equivalently predictive, and to capture the epistatic component during classification, we randomly ascribed weights to different alleles in different contexts and selected the combination that allowed for the most optimal quadratic discrimination. Our results suggest that there is much to be learned about the genetics of iris color from a detailed inspection of this optimal weighting scheme. At present, we do not understand the mechanism by which the features fit together the way they do in the optimal COA-derived quadratic classifier model (we intend to present these data elsewhere), only that they do and that the fit is of maximal practical utility for the inference of iris colors. The results we have obtained suggest that iris color is indeed a complex genetic trait, the “whole” of which was empirically determined to be greater than the sum of it's “parts”. On a more general level, our results illustrate a seemingly obvious but interesting concept: simple genetics approaches are useful for ascribing trait associations for individual genes and haplotypes within them, but because most human traits are complex, complex genetics tools are required for their use in the development of accurate classification tests. Given the sources of error for this work, including genotyping errors, errors in self-reported iris color and statistical haplotype inference, it is quite remarkable that perfect classification accuracy was achieved with a combined sample size of 550 for such a complex trait. In terms of feature modeling, almost identical results were obtained using a classification tree (CART-based) method (unpublished data), even though the cost function of the method we used herein relates genotypes (haplotype pairs) to trait values in a more direct way than CART. Thus, it appears that the methods we employed herein are substantiated by other analytical methodologies and may be promising for the generation of other complex genetics classifiers, for example pharmacogenomics or complex disease genetics classifiers.

[0806] Though there are a number of processes, developmental and cellular, that could explain iris color variance, our results suggest that polymorphisms in merely seven genes explain all of the variation in iris colors in the population. This result is surprising. Studies in Drosophila have implicated over 85 genes in iris pigmentation (Ooi et al., EMBO J. 16(15):4508-4518, 1997; Lloyd et al., Trends Cell Biol. 8(7):257-259, 1998) and far more than 8 genes have been implicated in oculocutaneous albinism in model vertebrates. That almost all of iris color variance in human beings can be explained by polymorphisms in 7 of 8 carefully selected genes, given the biological complexity of pigmentation, illustrates that just because a gene is crucial for a process (i.e., its mutation causes loss of function) does not necessarily mean that natural distributions of this process among individuals is related to natural polymorphisms in this gene. By way of analogy, there are many ways to break an automobile engine—removing a water hose for example—but virtually none of the variability in engine performance is caused by variability in hose characteristics. Certain parts of the complex genetics “engine” seem to have become sinks for accumulating functionally relevant polymorphisms during the evolutionary branching of our ancestors.

[0807] In fact, one of the surprising findings of our work was that of all of the genes we tested, the OCA2 gene explained by far the most iris color variance. Five of the 8 feature SNP combinations were from the OCA2 gene and 17 of the 25 SNPs part of these penetrant feature SNP combinations were OCA2 SNPs. To date, no polymorphism screens within OCA2 have yet been described (though they had been called for—see Sturm et al., Gene 277:49-62, 2001) and this work is the first indication of the importance this gene has for natural iris color pigmentation. The OCA2 gene product localizes to the melanosomal membrane and resembles an E. coli Na+/H+ anti-porter. Though TYR activity correlates perfectly with eumelanin content in melanosomes (lozumi et al., J. Invest. Dermatol. 100:806-811, 1993), its activity is thought to be manipulated by the OCA2 gene product through the control of intramelanosomal pH (Ancans et al., J. Invest. Dermatol. 117:158-159, 2001). Tyrosinase taken from dark and light skin functions identically in-vitro, but is highly pH dependent and melanocytes from white skin are more acidic than those from black (Fuller et al., Exp. Cell. Res. 262:97-208, 2001, Ancans et al., Exp. Cell. Res. 268:26-35, 2001). Given these observations, it seems that OCA2 is the primary modifier of TYR activity, which is consistent with our statistical results. It is interesting to note that at the level of the cladogram analysis, four of the five allele associations were obtained for OCA2 feature SNP combinations. It is also interesting to note .that the diversity of alleles associated with darker iris colors is significantly greater than that of alleles associated with lighter iris colors. These observations combined suggest that lighter colored irises branched from darker colored irises relatively long ago in human evolutionary time, and that modifications to the OCA2 gene may have been instrumental in this branching. The generally accepted anthropological and molecular view of the origin of modern humans from Africa states that Northern Europeans branched from African founders. Our results suggest that the reason lighter colored irises are almost exclusive to individuals of Northern European ancestry is in large part due to relatively ancient (and numerous) modifications of the OCA2 expression product. The fact that brown classifications were far more accurate relative to blue before, but not after, the addition of the latent genetic features to the classifier model may indicate that blue irises are subject to more epistasis than dark, and that dark eyes tend to be relatively (though not strictly speaking) dominant. When applied to a multi-racial sample, the penetrant feature (as well as the combined penetrant+latent feature) classifier performed with substantially better accuracy than when applied only to Caucasians. Since most non-Caucasian ethnic groups exhibit low variability in iris colors (on average of darker shade than Caucasians) this improvement may not seem surprising. However, though an incorrect solution would not necessarily be more accurate when applied to individuals of the world's various populations, notwithstanding genetic heterogeneity, a correct solution would be. The reason for this is that if alleles associated with darker iris color in Caucasians are deterministic, or linked to deterministic alleles for melanin production and iris color, and if we assume the between race component of iris color variance is low, the frequencies of these alleles should be greater in populations of average darker iris color. Because the accuracy of both our models increases when applied pan-ethnically, our results suggest that the penetrant and latent associations we have described are functionally relevant. Since most of the SNPs are intron or silent changes, we infer that the alleles we have described are statistically linked with other unidentified alleles, or are functional in ways other than through amino acid changes (such as RNA transcription, degradation, localization etc.). It is interesting that those that were amino acid changes tend to be changes in polarity, three of four involving an Arginine. Interestingly, the classifier we have generated for iris color does not accurately extend for classification of hair color or skin shade within Caucasians. In fact, this is what one would expect from a good complex genetic model for variable Caucasian iris color, since iris, skin and hair color are known to be independently inherited (and distributed) within this racial group. We have conducted a study similar to the one described herein for hair color and though there is about 33% overlap between the SNP marker sets, the sets are distinct (data be presented elsewhere). We assume that the classifier generated here would be, at least in part, extendable to other racial groups, such as for the discrimination between green, hazel and brown irises in individuals of African descent. Whether or not this is true is a subject for further study.

[0808] As the first genetic solution capable of ascribing qualitative characteristics from anonymously donated DNA, our results represent an important achievement. First, they illustrate one method for modeling complex human traits from high-density genomics data sets. Second, as a forensics tool, our solution could be used to guide criminal or other forensics investigations (in this case, multilocus genotype combinations that are relatively ambiguous could be classified with regard to iris color shade and conditional probability statements offered for specific iris color classifications). Third, as a research tool, the common haplotypes we have identified may help researchers more accurately define the complex genetics risks for pigmentation related diseases such as cataracts and melanoma.

TABLE 17-1
Genetic feature extraction results for human eye color.

| | CANDIDATE | □(n-SNP) | No. GENETIC | SELECTED HAPLOTYPE FEATURE | |
|---|---|---|---|---|---|
| GENE | SNPs¹ | TESTED³ | FEATURES⁴ | NAME, FEATURE Ids⁵ | P-value |
| AP3B1 | 6 | 1 | 0 | none | — |
| ASIP | 18 | 14 | 0 | none | — |
| DCT | 20 | 15 | 1 | DCT-B, (702\|650\|675) | <0.001 |
| MC1R | 16 | 8 | 1 | MC1R-A,(217438\|217439\|217441) | Insig* |
| OCA2 | 36 | 189 | 5 | OCA2-A, (217458\|886894\|886895\|886896) | <0.001 |
| | | | | OCA2-B, (217452\|712052\|886994) | <0.001 |
| | | | | OCA2-C, (712057\|712058\|712060\|712064) | 0.001 |
| | | | | OCA2-D, (712054\|712056\|886892) | 0.002 |
| | | | | OCA2-E, (217455\|712061\|886892) | 0.003 |
| SILV | 14 | 105 | 0 | None | — |
| TYR | 46 | 13 | 0 | None | — |
| TYRP1 | 28 | 66 | 1 | TYRP1-A, (886938\|886943) | <0.020 |
| TOTAL | 181 | 411 | 8 | 25 SNPs in 4 genes | |

¹Total number of SNPs in each gene tested for allelic association with iris color.
2- Total number of n-locus SNP combinations whose haploid alleles were tested for association with iris color using the genetic feature extraction algorithm described in the text. The number was dependent on the number of validated SNPs found from the total in column 2 (data not shown), and the results from lower order (i.e., 1, 2-locus combination) screens as described in the methods.
³Number of non-overlapping SNP combinations, alleles of which were identified as genetic features for variable iris color as described in the text.
⁴Name and SNP composition for each of the identified genetic features.
⁵F-statistic P-value for the HAPLOTYPE FEATURE allele sequence composition between individuals of light and dark iris shade as described in the text.
*one haplotype for this combination was found to be strongly associated with iris color shade, but the other observed haplotypes were not significant.
*this p-value was obtained within certain TYR genetic backgrounds. The p-value over a

[0809] TABLE 17-2
Description of SNP loci incorporated into the haplotype features and
classifier model for the inference of variable eye color described in the text.

| | | | | | | | | SEQ |
|---|---|---|---|---|---|---|---|---|
| | HAPLOID | | | FCA | | | Pigment | ID |
| GENE | FEATURE | POS. | MARKER | (minor) | TYPE¹ | SOURCE² | HISTORY | NO: |
| DCT | DCT-A | 2 | 702 | 0.15 | intron | dbsnp | none | 1 |
| DCT | DCT-A | 3 | 650 | 0.31 | intron | dbsnp | None | 2 |
| DCT | DCT-A | 4 | 675 | 0.21 | intron | dbsnp | None | 3 |
| MCIR | MC1R-A | 1 | 217438 | 0.07 | VAL_MET | resequencing | Red hair/blue | 4 |
| | | | | | | | eyes weak | |
| | | | | | | | association³ | |
| MCIR | MC1R-A | 2 | 217439 | 0.07 | ARG_CYS | dbSNP, | Red hair/blue | 5 |
| | | | | | | resequencing | eyes weak | |
| | | | | | | | association⁴ | |
| MCIR | MC1R-A | 3 | 217441 | 0.07 | ARG_TRP | resequencing | Red hair/blue | 6 |
| | | | | | | | eyes weak | |
| | | | | | | | association⁵ | |
| OCA2 | OCA2-A | 1 | 217458 | 0.29 | Silent | dbSNP | None | 7 |
| OCA2 | OCA2-A | 2 | 886894 | 0.32 | intron | resequencing | None | 8 |
| OCA2 | OCA2-A | 3 | 886895 | 0.13 | intron | resequencing | None | 9 |
| OCA2 | OCA2-A | 1 | 886896 | 0.34 | intron | resequencing | None | 10 |
| OCA2 | OCA2-B | 2 | 217452 | 0.04 | ARG_TRP | dbSNP | None | 11 |
| OCA2 | OCA2-B | 3 | 712052 | 0.23 | intron | dbSNP | None | 12 |
| OCA2 | OCA2-B | 4 | 886994 | 0.19 | intron | resequencing | none | 13 |
| OCA2 | OCA2C | 1 | 712057 | 0.18 | intron | dbSNP | None | 14 |
| OCA2 | OCA2C | 2 | 712058 | 0.11 | intron | dbSNP | None | 15 |
| OCA2 | OCA2C | 3 | 712060 | 0.06 | intron | dbSNP | None | 16 |
| OCA2 | OCA2C | 4 | 712064 | 0.01 | Silent | dbSNP | None | 17 |
| OCA2 | OCA2D | 1 | 712054 | 0.37 | intron | dbSNP | None | 18 |
| OCA2 | OCA2D | 2 | 712056 | 0.02 | intron | dbSNP | None | 19 |
| OCA2 | OCA2D | 3 | 886892 | 0.03 | intron | dbSNP | None | 20 |
| OCA2 | OCA2E | | 217455 | 0.42 | Silent | dbSNP | None | 21 |
| OCA2 | OCA2E | | 712061 | 0.02 | Silent | dbSNP | None | 22 |
| OCA2 | OCA2E | | 886892 | 0.19 | intron | resequencing | None | 23 |
| TYRP | TYRP-A | 1 | 886938 | 0.47 | intron | resequencing | None | 24 |
| TYRP | TYRP-A | 2 | 886943 | 0.47 | intron | resequencing | None | 25 |

¹SILENT - no amino acid change, INTRON - SNP was found in non-coding sequence.
²DbSNP - candidate gene sequence is present in the NCBI:dbSNP as of Feb. 15, 2002. resequencing - SNP sequence was discovered from the re-sequencing effort described in the text.
³Valverde et al., Nature Genet. 11: 328-330, 1995 and Schioth et al., 1999.
⁴Frandberg et al. Biochem. Biophys. Res. Commun. 245: 490-492, 1998; Smith et at., J. Invest. Derm. 111: 119-122, 1998.

[0810] The Gene and haplotype feature name are shown in columns 1 and 2. The position within the SNP combination discussed throughout the text is shown in column 3. The “marker” or unique identifier for the locus in column 4 and the frequency of the minor allele in the Caucasian population in column 5 (f_{CA}(minor)). The type of SNP (intron, silent and coding, where the two amino acid variants are separated by an underscore) is shown in column 6. The source of the SNP locus (from where we derived the sequence when designing our experiments) is shown in column 7 and the history of the SNP locus (whether there is any description of the SNP locus in the literature or otherwise common knowledge as relevant for the natural distribution of human pigmentation shades in any tissue).

TABLE 17-3

Effect statistics for the association of genetic feature alleles with iris colors
in the Caucasian population.

| | | | | | | | | | | |
|---|---|---|---|---|---|---|---|---|---|---|
| | | | | Posterior | | | | | Posterior | |
| Gene | Allele | p-value¹ | association | Probability² | (N)¹ | Genotypes: | p-value¹ | association | Probability² | (N)¹ |

| | | | | | | | | | | | |
|---|---|---|---|---|---|---|---|---|---|---|---|
| 1 | MCIR-A | CCC | 0.0458 | Hazel | 0.369 | 499 | CCC/CCC | 0.0327 | Hazel | 0.344 | 186 |
| 2 | | Total | Insig. | | | 648 | Total | Insig. | | | 324 |
| 3 | OCA2-A | TTAA | 0.0079 | Blue | 0.382 | 423 | TTAA/TTAA | 0.0194 | Blue | 0.415 | 147 |
| 4 | | CCAG | 0.0008 | Brown | 0.447 | 85 | TTAA/CCAG | 0.0613 | Brown | 0.386 | 56 |
| 5 | | TTAG | 0.0045 | Brown | 0.627 | 13 | TTAA/TTAG | 0.0006 | Brown | 0.735 | 11 |
| 6 | | | | | | | TTAA/CTAG | 0.0167 | Blue | 0.795 | 5 |
| 7 | | | | | | | CCAG/CCAG | 0.0488 | Brown | 0.584 | 7 |
| 8 | | | | | | | CCAG/CCGG | 0.0050 | Brown | 0.649 | 11 |
| 9 | | Total | 0.0453 | | | 606 | Total | 0.0053 | | | 303 |
| 10 | OCA2-B | CAA | 0.0269 | Blue | 0.381 | 354 | CAA/CAA | 0.0255 | Hazel | 0.375 | 112 |
| 11 | | CGA | 0.0024 | Brown | 0.389 | 131 | CAA/CGA | 0.0314 | Blue | 0.443 | 70 |
| 12 | | CAC | 0.0200 | Brown | 0.386 | 83 | CGA/CAC | 0.0024 | Brown | 0.542 | 24 |
| 13 | | CGC | 0.0441 | Green | 0.417 | 12 | CGA/CGC | 0.0006 | Green | 0.500 | 6 |
| 14 | | Total | 0.0058 | | | 606 | Total | 0.02148 | | | 303 |
| 15 | TYRP-B | TC | 0.001 | Blue | 0.403 | 234 | none | — | — | — | — |
| 16 | | Total | 0.0451 | | | 660 | Total | Insig. | | | 330 |
| 17 | DCT-B | CTG | 0.0133 | Brown | 0.362 | 94 | GCA/CTG | 0.0006 | Hazel | 0.100 | 53 |
| 18 | | GTG | 0.0249 | Hazel | 0.571 | 7 | GCA/GTA | 0.0527 | Blue | 0.625 | 8 |
| 19 | | | | | | | GCA/GTG | 0.0090 | Hazel | 0.667 | 6 |
| 20 | | | | | | | CCA/CTG | 0.0044 | Blue | 0.412 | 17 |
| 21 | | Total | Insig. | | | 660 | Total | Insig. | | | 330 |
| 22 | OCA2-C | GGAA | 0.0013 | Blue | 0.382 | 463 | GGAA/GGAA | 0.0086 | Blue | 0.4045 | 178 |
| 23 | | TGAA | 0.0125 | Brown | 0.4058 | 69 | GGAA/TAAA | 0.0089 | Hazel | 0.5385 | 13 |
| 24 | | TAAA | 0.0475 | Hazel | 0.4375 | 16 | TGAA/TAAA | 0.0033 | Brown | 1.0000 | 3 |
| 25 | | | | | | | GGGA/GGGA | 0.0500 | Brown | 0.3333 | 3 |
| 26 | | Total | 0.0189 | | | 606 | Total | 0.0547 | | | 303 |
| 27 | OCA2-D | AGG | 0.0468 | Hazel | 0.2832 | 346 | AGG/AGG | 0.0445 | Hazel | 0.3148 | 108 |
| 28 | | GGG | 0.0222 | Brown | 0.3377 | 231 | AGG/AGC | 0.0202 | Brown | 0.6667 | 6 |
| 29 | | | | | | | GGG/GGG | 0.0509 | Brown | 0.3913 | 46 |
| 30 | | Total | Insig. | | | 606 | Total | Insig. | | | 303 |
| 31 | OCA2-E | GCA | 0.0004 | Brown | 0.4828 | 58 | ACG/GCA | 0.0436 | Brown | 0.4048 | 42 |
| | | | | | | | GCA/GCA | 0.0034 | Brown | 1.0000 | 3 |
| 32 | | | | | | | GCA/GCG | 0.0060 | Brown | 0.8000 | 5 |
| 33 | | Total | Insig. | | | 614 | Total | Insig. | | | 307 |

¹Pearsons Chi-square statistic p-value. Only alleles and allele combinations that were significantly associated with an iris color are shown (n > 2).
²Bayesian posterior probability of correct eye color classification using allele frequency in the eye color group as the class conditional probability.

[0811] TABLE 17-4

Nested contingency analysis of haplotype clado-
grams for the identified genetic features of
variable eye color.

| Fea- | Contingency | Allele | p- | |
|---|---|---|---|---|
| ture | Significance | partition | value¹ | Site(s).² |
| MC1R-A | none found | — | — | — |
| OCA2-A | Between 3- | (CCAG + CCGG + | 0.0011 | 2 |
| | Step Clades | TCAG + TCGG + | | |
| | | TCAA) vs. | | |
| | | (TTGG + TTAG + | | |
| | | CTAG + CTAA + | | |
| | | TTAA) | | |
| OCA2-B | Within 1- | CGA vs. CAA | 0.0012 | 2 |
| | Step Clades | | | |
| | Between 2- | (TAC + CAC + | 0.0246 | 3 |
| | Step Clades | CGC) vs. | | |
| | | (CGA + CAA + | | |
| | | TAA + TGA) | | |
| OCA2-C | Between 3- | (TGAA + TAAA + | 0.0014 | 1 |
| | Step Clades | TAAG) vs. | | |
| | | (GGAA + GAAA + | | |
| | | GGGA + GAGA + | | |
| | | GGAG) | | |
| | Within 1- | TGAA vs. TAAA | 0.0263 | 2 |
| | Step Clades | | | |
| OCA2-D | Between 3- | (AGC + GGC) | 0.0052 | 3 |
| | Step Clades³ | vs. (AGG + | | |
| | | GGG + AAG + | | |
| | | GAG) | | |
| OCA2-E | none found | — | — | — |
| TYRP-A | Between 2- | (CC + CT + TT) | 0.0136 | 1 |
| | step Clades | vs. TC | | |
| DCT-B | none found | — | — | — |
| ¹Chi-square statistic p-value, degrees of freedom were 3 for each analysis. | | | | |
| ²Locus within the SNP combination that the nested contingency analysis shows significant variations in eye colors can be traced back to. This information is also present in the Allele partition column. | | | | |
| ³This is a good example of the value this nested cladogram analysis afforded. Though two alleles of the OCA2-D SNP combination (AGG and GGG, rows 27 and 28, column 3, Table 3) were associated with iris colors from Chi-square adjusted residual analysis, the Chi-square statistic for contingency analysis of all of the alleles together was not significant (row 30, column 3, Table 3). The nested cladogram analysis showed that these two sequences are evolutionary neighbors and suggested | | | | |
| #that the GG 3′ end of the OCA2-D combination is strongly associated with darker iris colors (p = 0.0014, Table 4). Evidently, this significance was lost in the noise produced at the pan-allele level by the lack of association between the other four haplotype alleles and iris colors. | | | | |

[0812] TABLE 17-5A
Allele frequency difference for alleles of latent haploid genetic features
among racial groups.

| GENE | MARKER | F_{ca}¹ | Fₐₐ² | Fₐₛ³ | F_{light}⁴ | F_{dark}⁵ | SEQ ID NO: |
|---|---|---|---|---|---|---|---|
| ASIP | 560 | 0.01 | 0 | 0.10 | 0.01 | 0.03 | 26 |
| ASIP | 552 | 0.19 | 0.58 | 0.23 | 0.19 | 0.49 | 27 |
| ASIP | 559 | 0.07 | 0.28 | 0 | 0.07 | 0.21 | 28 |
| ASIP | 468 | 0.20 | 0.80 | 0.40 | 0.20 | 0.70 | 29 |
| DCT | 657 | 0.28 | 0.29 | 0.90 | 0.28 | 0.44 | 30 |
| DCT | 674 | 0.36 | 0.56 | 0.63 | 0.36 | 0.58 | 31 |
| DCT | 632 | 0.01 | 0 | 0 | 0.01 | 0 | 32 |
| DCT | 701 | 0.21 | 0.32 | 0.10 | 0.21 | 0.27 | 33 |
| DCT | 710 | 0.53 | 0.37 | 0.57 | 0.53 | 0.42 | 34 |
| OCA2 | 217456 | 0.17 | 0.03 | 0.03 | 0.17 | 0.03 | 35 |
| SILV | 656 | 0.17 | 0.49 | 0.20 | 0.17 | 0.42 | 36 |
| SILV | 662 | 0.46 | 0.22 | 0.60 | 0.46 | 0.32 | 37 |
| SILV | 637 | 0.03 | 0 | 0.03 | 0.03 | 0.01 | 38 |
| TYR | 278 | 0.73 | 0.42 | 0.53 | 0.73 | 0.45 | 39 |
| TYR | 386 | 0.72 | 0.46 | 0.50 | 0.72 | 0.46 | 40 |
| TYR | 217480 | 0.17 | 0.03 | 0.03 | 0.17 | 0.03 | 41 |
| TYR | 951497 | 0.24 | 0.48 | 0.37 | 0.24 | 0.45 | 42 |
| TYR | 217468 | 0.64 | 0.10 | 0 | 0.64 | 0.08 | 43 |
| TYR | 217473 | 0.29 | 0.09 | 0.02 | 0.29 | 0.07 | 44 |
| TYRP1 | 217485 | 0.40 | 0.10 | 0.07 | 0.40 | 0.10 | 45 |
| TYRP1 | 217486 | 0.86 | 0.27 | 0.03 | 0.86 | 0.22 | 46 |
| TYRP1 | 869787 | 0 | 0.07 | 0 | 0 | 0.05 | 47 |
| TYRP1 | 869745 | 0 | 0.07 | 0 | 0 | 0.05 | 48 |
| TYRP1 | 886933 | 0.15 | 0.41 | 0.23 | 0.15 | 0.37 | 49 |
| TYRP1 | 886937 | 0.16 | 0.10 | 0 | 0.16 | 0.08 | 50 |
| TYRP1 | 886942 | 0 | 0.06 | 0 | 0 | 0.04 | 51 |

[0813] TABLE 17-5B

| GENE | MARKER | F_{ca} | Fₐₐ | Fₐₛ | F_{light} | F_{dark} |
|---|---|---|---|---|---|---|
| SILV | 704 | 0.66 | 0.59 | 0.77 | 0.66 | 0.63 |
| | 699 | 0.30 | 0.11 | 0.87 | 0.30 | 0.30 |

1- Frequency in the Caucasian racial group (N = 100).
2- Frequency in the African racial group (N = 100).
3- Frequency in the Asian racial group (N = 30).
4- The Caucasian group (N = 100) is designated the light (blue, green or hazel) iris colored race since the frequency of these iris colors is greatest in this group.
5- The African and Asian groups (N = 130) is designated the dark (black and brown) iris colored race since the frequency of blue, green and hazel irises are lowest in this group.

[0814] TABLE 17-5C
Allele frequency difference for alleles of latent haploid genetic features
among racial groups.

| COMBO. NAME | GENE | POS.¹ | SNP | F_{ca}² | Fₐₐ³ | Fₐₛ⁴ | F_{light}⁵ | F_{dark}⁶ |
|---|---|---|---|---|---|---|---|---|
| ASIP-A (L) | ASIP | 1 | 552 | 0.19 | 0.58 | 0.23 | 0.19 | 0.49 |
| ASIP-A (L) | ASIP | 2 | 468 | 0.2 | 0.8 | 0.4 | 0.2 | 0.7 |
| DCT-B (L) | DCT | 1 | 657 | 0.28 | 0.29 | 0.9 | 0.28 | 0.44 |
| DCT-B (L) | DCT | 2 | 701 | 0.21 | 0.32 | 0.1 | 0.21 | 0.27 |
| SILV-A (L) | SILV | 1 | 656 | 0.17 | 0.49 | 0.2 | 0.17 | 0.42 |
| SILV-A (L) | SILV | 2 | 662 | 0.46 | 0.22 | 0.6 | 0.46 | 0.32 |
| TYR-A (L) | TYR | 1 | 278 | 0.73 | 0.42 | 0.53 | 0.73 | 0.45 |
| TYR-A (L) | TYR | 2 | 386 | 0.72 | 0.46 | 0.5 | 0.72 | 0.46 |
| TYRP-B (L) | TYRP1 | 1 | 217485 | 0.4 | 0.1 | 0.07 | 0.4 | 0.1 |
| TYRP-B (L) | TYRP1 | 2 | 886933 | 0.15 | 0.41 | 0.23 | 0.15 | 0.37 |
| TYRP-B (L) | TYRP1 | 3 | 886937 | 0.16 | 0.1 | 0 | 0.16 | 0.08 |

[0815] TABLE 17-6
Correspondence analysis assisted quadratic discriminate-based
classification of iris colors using the penetrant genetic features of variable iris
color.
A

| | Light Iris | Dark Iris |
|---|---|---|
| | Classification¹ | Classification¹ |
| Individuals of Light Irises | 97.5% (197) | 2.5% (5) |
| Individuals of Dark Irises | 0 | 100 (84) |

B

| | Blue Iris | Brown Iris | Green Iris | Hazel Iris |
|---|---|---|---|---|
| | Classification¹ | Classification¹ | Classification¹ | Classification¹ |
| Individuals of Blue Irises | 100% (97) | 0 | 0 | 0 |
| Individuals of Brown Irises | 19% (40) | 69% (141) | 0 | 12% (24) |
| Individuals of Green Irises | 0 | 0 | 100% (32) | 0 |
| Individuals of Hazel Irises | 14% (12) | 0 | 1% (1) | 84% (69) |

¹Percent classified is shown, with the number of individuals classified shown in parentheses.
A Probability table for classification between dark (black and brown) versus light (blue, green and hazel) iris colors.
B Probability table for classification among the various iris colors.

[0816] TABLE 17-7
Correspondence analysis assisted quadratic discriminate-based
classification of iris colors using both penetrant and latent genetic features
of variable iris color.
A

| | Blue Iris | Brown Iris | Green Iris | Hazel Iris | |
|---|---|---|---|---|---|
| | Classification¹ | Classification¹ | Classification¹ | Classification¹ | Total |
| Individuals of Blue Irises | 100% (97) | 0 | 0 | 0 | 97 |
| Individuals of Brown Irises | 0 | 100% (84) | 0 | 0 | 84 |
| Individuals of Green Irises | 0 | 0 | 100% (30) | 0 | 30 |
| Individuals of Hazel Irises | 0 | 0 | 0 | 100%(75) | 75 |
| Total | 97 | 841 | 31 | 59 | 286 |

B

| | Light Iris | Dark Iris |
|---|---|---|
| | Classification¹ | Classification¹ |
| Individuals of Light Irises | 100% (197) | 0 |
| Individuals of Dark Irises | 0 | 100% (84) |

¹Percent classified is shown, with the number of individuals classified shown in parentheses.
Table 27-7. A) Probability table for classification between dark (black and brown) versus light (blue, green and hazel) iris colors. B) Probability table for classification among the various iris colors.

[0817] TABLE 17-8

Primers for Nucleotide Occurrence Determination of SNPs

| | | | | |
|---|---|---|---|---|
| SEQ ID | | Marker | Primer | |
| NO | Marker Name | No. | Use | Sequence |

| | | | | |
|---|---|---|---|---|
| 100 | TYRP_4 | 217486 | PCR | GAGTATGTGAAGATATAAGTAAGTGAACTACCAT |
| 101 | | | PCR | ACTGTGGTTTTCTTTAAATCTGTTGAC |
| 102 | | | Primer | AGCGATCTGCGAGACCGTATATTTCTAAAATGTTAA |
| | | | ext | AACATAAAC |
| 103 | DCT2892681 | 650 | PCR | AAGGAGAAGGCAAGATCCTAAG |
| 104 | | | PCR | GCCCTCCTGAGAGCTACAATTT |
| 105 | | | Primer | GGCTATGATTCGCAATGCTTCAATTAGTAATCTGGA |
| | | | ext | GAGATAAAA |
| 106 | | | Primer | GGATGGCGTTCCGTCCTATTCAATTAGTAATCTGGA |
| | | | ext | GAGATAAAA |
| 107 | OCA2E16_300 | 886892 | PCR | TGGCATTCATCTTGATCTTGG |
| 108 | | | PCR | CTGTGGGCAAAGTCAGTGTCT |
| 109 | | | Primer | ACGCACGTCCACGGTGATTTGGTTCATAGGCTTTGT |
| | | | ext | CACATTCTG |
| 110 | OCA2E10_549 | 886994 | PCR | AGCCATTAGCTTCTGATTACTTTGC |
| 111 | | | PCR | GGCCAGAGCTGGCTGGTG |
| 112 | | | Primer | ACGCACGTCCACGGTGATTTTTTTGGTGAAATAATT |
| | | | ext | TCCATGATT |
| 113 | TYRP_3 | 217485 | PCR | GTGGTCTAACAAATGCCCTACTCTC |
| 114 | | | PCR | AAAGGGTCTTCCCAGCTTTG |
| 115 | | | Primer | AGGGTCTCTACGCTGAGGATTCTTTCTAATACAAGC |
| | | | ext | ATATGTTAG |
| 116 | TYR_3 | 217468 | PCR | TAACGACATCAATATTTATGACCTCTTTG |
| 117 | | | PCR | GCAGAAAAGCTGGTGCTTCA |
| 118 | | | Primer | CGTGCCGCTCGTGATAGAATTCAATGGATGCACTG |
| | | | ext | CTTGGGGGAT |
| 119 | ASIP2424984 | 468 | PCR | AGTGGCCCAAGCTCACTTA |
| 120 | | | PCR | AAGGCAAATGGGAAATCCAA |
| 121 | | | Primer | AGATAGAGTCGATGCCAGCTGTCGAGGGACCAGGC |
| | | | ext | CCCACAAGAG |
| 122 | DCT2031527 | 675 | PCR | CCCTGGGGCAACCTTACTAA |
| 123 | | | PCR | CAGCATTTTGTTCACTCAGTTCTC |
| 124 | | | Primer | GGATGGCGTTCCGTCCTATTAAACATATCACCTACT |
| | | | ext | ATGACAGTA |
| 125 | DCT1325611 | 657 | PCR | GCATCTAAGGCCCTCTGTACCT |
| 126 | | | PCR | TAGAAAGCAATCAAGATGATTTCAGAG |
| 127 | | | Primer | GCGGTAGGTTCCCGACATATCTCTTTCATAAATTTG |
| | | | ext | AACTTAATT |
| 128 | OCA2_2 | 217452 | PCR | TAAGGTCGTTGTTTCGTTCT |
| 129 | | | PCR | ATGAGCCATCAAAAGAGGG |
| 130 | | | Primer | AGAGCGAGTGACGCATACTACAGAGAGACGGTGTC |
| | | | ext | CATCAGCATC |
| 131 | OCA2_8 | 217458 | PCR | GCCTGGACTTTGCCGGAT |
| 132 | | | PCR | CTTTCTGTTCCAGTAAAGGAGTCTGA |
| 133 | | | Primer | GTGATTCTGTACGTGTCGCCCTGCACACATGTTCAT |
| | | | ext | TGGGATTTG |
| 134 | OCA2DBSNP_{—} | 712056 | PCR | GACACGAATTTTTATTGGACATGTTTA |
| | 252 | | | |
| 135 | | | PCR | AGGGTTATGCTCAAGGCCAT |
| 136 | | | Primer | AGCGATCTGCGAGACCGTATTTATTGTAGTAGATGT |
| | | | ext | TCATGATTC |
| 137 | SILV1052206 | 656 | PCR | GCTGCGTCTACCCCGCAT |
| 138 | | | PCR | AAATATAGGTGTTTCTGTCAACTCCAG |
| 139 | | | Primer | AGAGCGAGTGACGCATACTATCTGCTCTTGTCCCAT |
| | | | ext | TGGTGAGAA |
| 140 | SILV1052165 | 662 | PCR | TCCTGAGAAATCAGCCTCTG |
| 141 | | | PCR | AGTCCCAGGTGTAGGAGAGGTC |
| 142 | | | Primer | GTGATTCTGTACGTGTCGCCCCTTTGCCCTCCAGCT |
| | | | ext | CCATGACCC |
| 143 | TYRP1E4_32 | 886933 | PCR | GCCCCTCAGACACCGTTG |
| 144 | | | PCR | ATTATTCATTTCTGTTTGGTCTACTCTCTG |
| 145 | | | NPCR | CCTCAGACACCGTTGATATAC |
| 146 | | | NPCR | GTGTAGGCACTTTCTGTTTCC |
| 147 | | | Primer | GGATGGCGTTCCGTCCTATTTACCTTATTGTCTGAA |
| | | | ext | GAGAGCTAA |
| 148 | TYRP1E7_420 | 886943 | PCR | TCCAAAARCAAATGTGTTATCTTTCA |
| 149 | | | PCR | AGGGTGCTGTACAATAAGATCAATATC |
| 150 | | | Primer | GGCTATGATTCGCAATGCTTTTGGACTTGGAAACTT |
| | | | ext | TCATTTGTA |
| 151 | MC1R_5 | 217439 | PCR | ATCGCCGTGGACCGCTAC |
| 152 | | | PCR | GGGTCACGRTGCTGTGGTA |
| 153 | | | Primer | ACGCACGTCCACGGTGATTTCTACATCTCCATCTTC |
| | | | ext | TACGCACTG |
| 154 | MC1R_7 | 217441 | PCR | TACATCTCCATCTTCTACGCACTG |
| 155 | | | PCR | GATGAAGAGCGTGCTGAAGAC |
| 156 | | | Primer | CGTGCCGCTCGTGATAGAATCTACCACAGCATCGT |
| | | | ext | GACCCTGCCG |
| 157 | OCA2_RS1800 | 712061 | PCR | CATGCTGGGTTCCCTTGC |
| | 405 | | | |
| 158 | | | PCR | CACTGAGTGGTAAGCCAGGG |
| 159 | | | Primer | AGGGTCTCTACGCTGACGATCACTGGCAGCACTGG |
| | | | ext | CTGTGATTGG |
| | | | 1 | |
| 160 | ASIP819135 | 552 | PCR | AAGGGGCCACTTACCTCTTCA |
| 161 | | | PCR | GGCAGAGTTGTTGAAAGGCC |
| 162 | | | Primer | GACCTGGGTGTCGATACCTAACTTAATTTATTAGCC |
| | | | ext | TTATTCTGT |
| 163 | DCT2296498 | 701 | PCR | ATCAACTCATATAGAGTGACTATGATGG |
| 164 | | | PCR | CCTGCTTGGAGAGAGAGATTCA |
| 165 | | | Primer | GGCTATGATTCGCAATGCTTGAGGATCAAGATTTCG |
| | | | ext | GGAAGAAAA |
| 166 | DCT1028806 | 702 | PCR | TTAGTCCTAATGCAGTATTTATGTAACC |
| 167 | | | PCR | TCTCAGCGAACATGCTTGT |
| 168 | | | Primer | CGTGCCGCTCGTGATAGAATAACTTTCGCGTATTTT |
| | | | ext | GCCTCACCC |
| 169 | | | Primer | AGCGATCTGCGAGACCGTATAACTTTCGCGTATTTT |
| | | | ext | GCCTCACCC |
| 170 | OCA2_5 | 217455 | PCR | CGGTAATTTCCTGTGCTTCT |
| 171 | | | PCR | AACTTACATCGCCAATCACAG |
| 172 | | | Primer | AGAGCGAGTGACGCATACTATCCAGATCGTGCACA |
| | | | ext | GAACTCTGGC |
| 173 | OCA2DBSNP_{—} | 712052 | PCR | TTTCTTCTAATGGCATTGCATTTT |
| | 52401 | | | |
| 174 | | | PCR | CTAATAGACTAATATAACCCAAACAGAAGTCCT |
| 175 | | | Primer | GTGATTCTGTACGTGTCGCCGAATAGACCAGACAC |
| | | | ext | CTAGACTTTA |
| 176 | OCA2DBSNP_{—} | 712054 | PCR | AAACATCTTTATAGAGCCTTTCCCTG |
| | 146405 | | | |
| 177 | | | PCR | GCCTTCAGGGCCAGGAGC |
| 178 | | | Primer | ACGCACGTCCACGGTGATTTTGCACGTTGCAGGGC |
| | | | ext | CCGCCCTCTG |
| 179 | OCA2DBSNP_{—} | 712058 | PCR | AAACATCTTTATAGAGCCTTTCCCTG |
| | 98488 | | | |
| 180 | | | PCR | GCCTTCAGGGCCAGGAGC |
| 181 | | | Primer | ACGCACGTCCACGGTGATTTTGCACGTTGCAGGGC |
| | | | ext | CCGCCCTCTG |
| 182 | OCA2DBSNP_{—} | 712060 | PCR | CTCTTGGAACAAGTGAAAAATGA |
| | 165011 | | | |
| 183 | | | PCR | TGCTCTTAGGATGTTTTCAGATTGA |
| 184 | | | Primer | GGCTATGATTCGCAATGCTTTCATTTCCATTTGGTTC |
| | | | ext | TTTTTTCT |
| 185 | OCA2RS18004 | 712064 | PCR | TCAGAAGGTTGTGCAGAGTAA |
| | 14 | | | |
| 186 | | | PCR | AACACTGTCAGGCATTTGG |
| 187 | | | Primer | ACGCACGTCCACGGTGATTTTGAGCTGTGGTTTCTC |
| | | | ext | TCTTACAGC |
| 188 | OCA2E14_447 | 886894 | PCR | TAATACRTGATATTTAGGTGACGCACA |
| 189 | | | PCR | GTGTTGTTTCTTTGGTCCTTAAACTC |
| 190 | | | Primer | GGATGGCGTTCCGTCCTATTTAAACTCGGCTGTGTA |
| | | | ext | CCCCCTGCA |
| 191 | | | Primer | CGTGCCGCTCGTGATAGAATCATTTTATCTAACCCT |
| | | | ext | CACTGAGCT |
| 192 | OCA2E11_263 | 886895 | PCR | ATGCTCCTCTTCACGCCTG |
| 193 | | | PCR | CTTTTCATGCACCTGAGAATGG |
| 194 | | | Primer | AGATAGAGTCGATGCCAGCTGTACGCAAAGCACCT |
| | | | ext | CTGCCGTGGG |
| 195 | OCA2E11_350 | 886896 | PCR | TGCCTGGCTCCAGGTTCC |
| 196 | | | PCR | CAGACACGAGCTGGACTGG |
| 197 | | | Primer | CGACTGTAGGTGCGTAACTCCTCAGGTGCATGAAA |
| | | | ext | AGGTGGGGGC |
| 198 | | | Primer | AGGGTCTCTACGCTGACGATCTCAGGTGCATGAAA |
| | | | ext | AGGTGGGGGC |
| 199 | OCA2E10_102 | 886993 | PCR | GTTTTAATATGGTGTCCTGCTAAAA |
| 200 | | | PCR | TTTACAGCACAATAATCGAAAAATC |
| 201 | | | Primer | AGCGATCTGCGAGACCGTATTTATCCTTGTCTTCTT |
| | | | ext | CTTTTCCCC |
| 202 | | | Primer | GCGGTAGGTTCCCGACATATTTATCCTTGTCTTCTT |
| | | | ext | CTTTTCCCC |
| 203 | TYR_RS18519 | 278 | PCR | TATTGAGTAGCTCACAAAATCATGGA |
| | 92 | | | |
| 204 | | | PCR | TGCCCTGTGTTCTATAGCATGG |
| 205 | | | Primer | GCGGTAGGTTCCCGACATATAAACAGGTGAGAATAA |
| | | | ext | GCAAGAAGG |
| 206 | TYR_RS18274 | 386 | PCR | GAAAAAAAAAGGTTTTGAGACATGACT |
| | 30 | | | |
| 207 | | | PCR | GGTCCCAGTATTTCAGGTGAATAAA |
| 208 | | | Primer | GGCTATGATTCGCAATGCTTGACTGTAAGGTGACCT |
| | | | ext | GGGAAATTC |
| 209 | | | Primer | AGCGATCTGCGAGACCGTATGACTGTAAGGTGACC |
| | | | ext | TGGGAAATTC |
| 210 | TYRP1E6_354 | 886938 | PCR | ATGAATGGCTGAGGAGATAC |
| 211 | | | PCR | AACTGATAACTATGCCATCTAAACAAT |
| 212 | | | Primer | AGGGTCTCTAGGCTGACGATAATCYGCCCAGCTGA |
| | | | ext | GCATGCAAAA |
| 213 | MC1R_4 | 217438 | PCR | ACTCACCCATGTACTGCTTCA |
| 214 | | | PCR | TCAATGACATTGTCCAGCTG |
| 215 | | | Primer | CGTGCCGCTCGTGATAGAATGGASCTGCTGGTGAG |
| | | | ext | CGGGASSAAC |
| 216 | OCA2DBSNP_{—} | 712057 | PCR | TGTGCCTGCTCTATGTCTGTGT |
| | 8321 | | | |
| 217 | | | PCR | GGTGCACACACAGAGACATACAG |
| 218 | | | Primer | ACGCACGTCCACGGTGATTTTGCACCAGTGTGAACT |
| | | | ext | GTGTAGGTT |
| 219 | | | Primer | AGCGATCTGCGAGACCGTATTGCACCAGTGTGAAC |
| | | | ext | TGTGTAGGTT |
| 220 | TYRP1E4_499 | 886937 | PCR | CCTCAGACACCGTTGATATAC |
| 221 | | | PCR | GTGTAGGCACTTTCTGTTTCC |
| 222 | | | NPCR | CCTCAGACACCGTTGATATAC |
| 223 | | | NPCR | GTGTAGGCACTTTCTGTTTCC |
| 224 | | | Primer | ACGCACGTCCACGGTGATTTCACCTAGAATGTTCAA |
| | | | ext | GGTACTCTA |

Table 17-8. PCR indicates that the primer was used in a PCR reaction to amplify a target polynucleotide surrounding the SNP. NPCR indicates that the primer was used for a nested PCR which amplified a sequence within the amplified product of the first PCR reaction. Primer ext indicates the primer that was used in a primer extension reaction using the amplified product as a template.

### EXAMPLE 18

### Identification of Penetrant Haplotypes for Infering Hair Color

[0818] This example provides the identification of penetrant SNP marker and marker sets that are associated with hair color. Penetrant SNP marker sets were identified that were associated with variable hair color in precisely the same way we have just described for eye color, except of course during genetic feature extraction step where we partitioned individuals by hair color shade rather than eye color shade. Table 18-1 lists some of the markers that were identified and provides data on the frequency of alleles of those SNPs for individuals of different hair color, and a justification for considering the SNP preferentially segregated in either light or dark hair. The results of feature extraction are shown in Table 18-2. Table 18-3, lists some of the individual SNPs that were identified and provide further information on these SNPs which are also included in Table 1.

[0819] The SNP markers with penetrant alleles associated with Caucasian hair color were:
[0820] 1. OCA2 gene: Markers 886896, 886894, 217458, 712060, 886895, 712057, 712054, 886892, 217455, and 712056.
[0821] 2. TYRP gene: Markers 217486, 886937.
[0822] 3. MC1R gene: Markers 217438, 217439, 217441.
[0823] ASIP gene: Markers 559, 560.

[0824] Those in bold print are markers were discovered by re-sequencing efforts and were not found in the literature or in any public database, and were useful in developing certain preferred hair color classifiers described herein.

[0825] It is interesting to note with respect to penetrant hair color SNPs and haplotypes, versus penetrant eye color SNPs and haplotypes, the following:
[0826] 1) Penetrant SNPs were identified within the ASIP gene to be predictive of human hair color, but none were identified as predictive for Caucasian eye color.
[0827] 2) No penetrant SNPs or penetrant SNP sets were identified within the TYR or DCT genes as associated with Caucasian hair color, though 3 in DCT were identified as associated with Caucasian eye color.
[0828] 3) The penetrant TYRP SNPs identified as associated with Caucasian hair color are different from those identified as associated with Caucasian eye color.
[0829] 4) The penetrant MC1R and OCA2 SNPs identified as associated with Caucasian hair color are the same SNPs identified as associated with Caucasian eye color, though not all of the OCA2 SNPs identified as associated with Caucasian eye color were included in the set associated with hair color.

[0830] These observations are interesting because it is known that hair and eye color are independently inherited, but individuals of darker hair have a darker average eye color shade. That the OCA2 and MC1R SNP sets we identified as associated with Caucasian hair color were a subset of those identified as associated with Caucasian eye color may indicate why it is that eye and hair color shades tend to co-occur in the Caucasian (in fact, the world) population. That the TYRP, ASIP, TYR and DCT SNPs identified as associated with hair or eye color (as the case may be) were distinct makes sense in terms of what is known about the genetics of eye and hair color inheritance; namely that the two traits are independently inherited. For example, there exist brown or even black hair individuals with blue or green eyes, and there exist blond haired individuals with brown eyes. Knowing the eye color of parents imparts no ability to predict the eye and hair color of their offspring. Knowing the hair color of parents imparts some ability to predict the hair color of their offspring, but not all. Obviously the inherited factors imparting eumelanin content in human hair and eyes are distinct, and our findings that the human polymorphism sets related to eye and hair color are distinct, yet overlapping, seem to make perfect sense in light of the biology of these two traits and validate our invention.

TABLE 18-1

Genetic feature extraction table for variable
HAIR color shade.
APPENDIX H
SNPS WITH ALLELES THAT SEGREGATE PREFERENTIALLY
IN EITHER DARK OR LIGHT HAIR COLORED
CAUCASIANS:

| | | | | | |
|---|---|---|---|---|---|
| | | | | | INTE- |
| GENE | SNPNAME | MARKER | LOCATION | GENBANK | GRITY |

| | | | | | |
|---|---|---|---|---|---|
| 1. | | | | | |
| OCA2 | OCA2_5 | 217455 | 21103 | 13651545 | POLY |

217455 OCA2_5

| | | | |
|---|---|---|---|
| | AA | GA | GG |
| BLACK | 1 | 2 | 0 |
| BROWN | 33 | 21 | 0 |
| AUB/RED | 6 | 0 | 0 |
| BLOND | 9 | 2 | 0 |

JUSTIFICATION: This SNP is part of the OCA3LOC109
and OCA3LOC920 haplotype systems, the utility of
which has been demonstrated in the text elsewhere
in this patent. As can be seen from this distribu-
tion, the ratio of AA:GA:GG alleles in dark
(BLACK + BROWN) haired individuals is 39:23:0 but
15:2:0 in light haired persons, which is signifi-
cantly different. Thus, the G allele is enriched
for individuals of darker (brown and hazel) hair
color.
2.

| | | | | | |
|---|---|---|---|---|---|
| OCA2 | OCA2_6 | 217456 | 26558 | 13651545 | POLY |

217456 OCA2_6

| | | | |
|---|---|---|---|
| | AA | GA | GG |
| BLACK | 0 | 1 | 1 |
| BROWN | 0 | 5 | 41 |
| AUB/RED | 0 | 0 | 5 |
| BLOND | 0 | 0 | 12 |

JUSTIFICATION: As can be seen from this distribu-
tion, the A allele was only observed in indivi-
duals of dark (BLACK or BROWN) hair color.
3.

| | | | | | |
|---|---|---|---|---|---|
| OCA2 | OCA2_8 | 217458 | 86326 | 13651545 | POLY |

217458 OCA2_8

| | | | |
|---|---|---|---|
| | CC | CT | TT |
| BLACK | 0 | 2 | 2 |
| BROWN | 5 | 26 | 34 |
| AUB/RED | 0 | 1 | 4 |
| BLOND | 1 | 5 | 8 |

JUSTIFICATION: The C allele is enriched in indivi-
duals of darker (BLACK or BROW) hair color rela-
tive to light. The ratio of CC:CT:TT genotypes in
the former group is.5:28:36 but only 1:6:12 in the
latter group, which is significantly different.
4.

| | | | | | |
|---|---|---|---|---|---|
| OCA2 | OCA2DBSNP_ | 712052 | 52401 | 13651545 | POLY |
| | 52401 | | | | |

712052 OCA2DBSNP_52401

| | | | |
|---|---|---|---|
| | AA | GA | GG |
| BLACK | 2 | 1 | 1 |
| BROWN | 43 | 24 | 2 |
| AUB/RED | 4 | 3 | 0 |
| BLOND | 8 | 6 | 0 |

JUSTIFICATION: The ratio of GG:GA:AA alleles for
dark haired individuals is 3:25:45 and for light
haired individuals (BLOND, AUB/RED) is 0:9:12. It
appears from this that the G allele is more fre-
quently found in individuals of light hair color.
5.

| | | | | | |
|---|---|---|---|---|---|
| OCA2 | OCA2DBSNP_ | 712058 | 98488 | 13651545 | POLY |
| | 98488 | | | | |

712058 OCA2DBSNP_98488

| | | | |
|---|---|---|---|
| | AA | GA | GG |
| BLACK | 0 | 0 | 4 |
| BROWN | 1 | 10 | 38 |
| AUB/RED | 0 | 0 | 6 |
| BLOND | 0 | 4 | 14 |

JUSTIFICATION: The ratio of AA:GA:GG genotypes in
dark hair (BLACK + BROWN) individuals is 1:10:42,
but 0:4:20 in lights which is not significantly
different. Nonetheless, this SNP is part of the
OCA3LOC109 haplotype system which is a reasonable
genetic feature for human hair color as described
in the text.
6.

| | | | | | |
|---|---|---|---|---|---|
| OCA2 | OCA2DBSNP_ | 712054 | 146405 | 13651545 | POLY |
| | 146405 | | | | |

712054 OCA2DBSNP_146405

| | | | |
|---|---|---|---|
| | AA | GA | GG |
| BLACK | 1 | 2 | 1 |
| BROWN | 30 | 28 | 10 |
| AUB/RED | 4 | 2 | 0 |
| BLOND | 0 | 6 | 6 |

JUSTIFICATION: The ratio of AA:GA:GG genotypes in
the dark (BROWN and BLACK) group is 31:30:11 but
is 4:8:6 in the light group and 0:6:6 in the blond
group, showing that the G allele is more frequent-
ly found in the light hair group.
7.

| | | | | | |
|---|---|---|---|---|---|
| OCA2 | OCA2DBSNP_8321 | 712057 | 8321 | 13651545 | POLY |

712057 OCA2DBSNP_8321

| | | | |
|---|---|---|---|
| | GG | GT | TT |
| BLACK | 4 | 0 | 0 |
| BROWN | 45 | 22 | 2 |
| AUB/RED | 6 | 1 | 0 |
| BLOND | 8 | 6 | 0 |

JUSTIFICATION: The GG:GT:TT genotype ratio in the
blond group is 8:6:0, but 55:23:2 which is not
significantly different. Nonetheless, this SNP is
part of a good genetic feature (the OCA3LOC109
haplotype system) for predicting human hair color
as described in the text of the application.
8.

| | | | | | |
|---|---|---|---|---|---|
| OCA2 | OCA2E11_263 | 886895 | 26692 | 1365145 | POLY |

886895 OCA2E11_263

| | | | |
|---|---|---|---|
| | AA | AG | GG |
| BLACK | 5 | 0 | 0 |
| BROWN | 46 | 13 | 2 |
| AUB/RED | 7 | 0 | 0 |
| BLOND | 14 | 5 | 0 |

JUSTIFICATION: The ratio of AA:AG:GG genotypes is
not significantly different between the shade of
hair color groups, but this SNP is part of the
OCA3LOC109 haplotype system, the utility of which
was described in the text.
9.

| | | | | | |
|---|---|---|---|---|---|
| OCA2 | OCA2E11_350 | 886896 | 26779 | 1365145 | POLY |

886896 OCA2E11_350

| | | | |
|---|---|---|---|
| | AA | AG | GG |
| BLACK | 2 | 3 | 0 |
| BROWN | 30 | 26 | 6 |
| AUB/RED | 5 | 1 | 1 |
| BLOND | 12 | 7 | 0 |

JUSTIFICATION: The ratio of AA:AG:GG genotypes is
32:29:6 for dark hair individuals but only 17:8:1
for the light group. The frequency of the G allele
is therefore greater in the dark hair group. This
SNP is part of the OCA3LOC109 haplotype system,
the utility of which was demonstrated in the text.
10.

| | | | | | |
|---|---|---|---|---|---|
| OCA2 | OCA2E14_447 | 886894 | 95957 | 1365145 | POLY |

886894 OCA2E14_447

| | | | |
|---|---|---|---|
| | CC | CT | TT |
| BLACK | 0 | 3 | 2 |
| BROWN | 3 | 23 | 36 |
| AUB/RED | 1 | 1 | 5 |
| BLOND | 0 | 6 | 13 |

JUSTIFICATION: The ratio of CC:CT:TT genotypes in
dark hair individuals (brown and black) is 3:26:38
but only 1:7:18 in light hair individuals. The
frequency of the C allele is therefore greater in
the dark hair group (more heterozygotes relative
to TT homozygotes).
11.

| | | | | | |
|---|---|---|---|---|---|
| OCA2 | OCA2E10_102 | 886993 | 25083 | 1365145 | POLY |

886993 OCA2E10_102

| | | | |
|---|---|---|---|
| | AA | AG | GG |
| BLACK | 0 | 2 | 0 |
| BROWN | 1 | 10 | 42 |
| AUB/RED | 0 | 1 | 4 |
| BLOND | 0 | 1 | 14 |

JUSTIFICATON: The ratio of AA:AG:GG genotypes in
individuals of dark hair color is 1:12:42, but
only 0:2:18 in persons of light hair color. There-
fore the frequency of the A allele is greater in
persons of darker hair color.
12.

| | | | | | |
|---|---|---|---|---|---|
| OCA2 | OCA2E10_549 | 886994 | 25519 | 1365145 | POLY |

886994 OCA2E10_549

| | | | |
|---|---|---|---|
| | CC | CA | AA |
| BLACK | 0 | 2 | 1 |
| BROWN | 1 | 14 | 47 |
| AUB/RED | 0 | 1 | 5 |
| BLOND | 0 | 1 | 16 |

JUSTIFICATION: The ratio of CC:CA:AA genotypes in
persons of darker hair color is 1:16:48 but only
0:2:21 in persons of lighter hair color. There-
fore, the C allele is more frequently found in
persons of darker hair color.
13.

| | | | | | |
|---|---|---|---|---|---|
| TYR | TYR_3 | 217468 | 656 | A9000720 | POLY |

217468 TYR_3

| | | | |
|---|---|---|---|
| | CC | CA | AA |
| BLACK | 2 | 2 | 0 |
| BROWN | 26 | 35 | 6 |
| AUB/RED | 1 | 4 | 0 |
| BLOND | 3 | 5 | 3 |

JUSTIFICATION: The ratio of CC:CA:AA genotypes is
28:37:6 in persons of darker hair color, but 4:9:3
in persons of lighter hair color. Therefore, the
frequency of the A allele is greater in persons of
lighter hair color.
14.

| | | | | | |
|---|---|---|---|---|---|
| TYR | TYRSNP_7 | 217472 | 37266 | AP000720 | POLY |

[NO TABLE OR JUSTIFICATION]
15.

| | | | | | |
|---|---|---|---|---|---|
| TYR | TYRSNP_8 | 217473 | 77771 | AP000720 | POLY |

217473 TYRSNP_8

| | | | |
|---|---|---|---|
| | AA | GA | GG |
| BLACK | 0 | 5 | 2 |
| BROWN | 0 | 47 | 41 |
| AUB/RED | 0 | 6 | 4 |
| BLOND | 0 | 11 | 14 |

JUSTIFICATION: The frequency of AA:GA:GG genotypes
in persons of blond hair color is 0:11:14, but
0:58:47 in persons of dark or red/auburn hair
color. Thus, the frequency of the A allele is
slightly higher in persons of non-blond hair
color.
16.

| | | | | | |
|---|---|---|---|---|---|
| TYR | TYRE3_358 | 951497 | 37434 | AP000720 | POLY |

951497 TYRE3_358

| | | | |
|---|---|---|---|
| | AA | GA | GG |
| BLACK | 0 | 1 | 4 |
| BROWN | 1 | 8 | 51 |
| AUB/RED | 0 | 1 | 6 |
| BLOND | 1 | 3 | 15 |

JUSTIFICATION: The ratio of AA:GA:GG genotypes in
persons of darker hair color (brown and black) is
not significantly different from that of light
hair color, but this SNP is part of a good haplo-
type based feature for hair color (the TYR2LOC920
haplotype system described in the text).
17.

| | | | | | |
|---|---|---|---|---|---|
| MC1R | MC1R_4 | 217438 | 442 | X67594 | POLY |

217438 MC1R_4

| | | | |
|---|---|---|---|
| | CC | CT | TT |
| BLACK | 3 | 1 | 0 |
| BROWN | 64 | 5 | 0 |
| AUB/RED | 6 | 0 | 0 |
| BLOND | 13 | 1 | 0 |

JUSTIFICATION: The ratio of CC:CT:TT genotypes in
persons of darker hair color is 67:6:0 and 19:1:0
in persons of lighter hair color, which is slight-
ly different. However, this SNP is part of the
MCR3LOC105 haplotype system, the utility of which
was discussed in the text.
18.

| | | | | | |
|---|---|---|---|---|---|
| MC1R | MC1R_5 | 217439 | 619 | x67594 | POLY |

217439 MC1R_5

| | | | |
|---|---|---|---|
| | CC | CT | TT |
| BLACK | 4 | 0 | 0 |
| BROWN | 59 | 7 | 0 |
| AUB/RED | 5 | 0 | 0 |
| BLOND | 10 | 4 | 0 |

JUSTIFICATION: This SNP is part of the MCR3LOC105
haplotype system, the utility of which was dis-
cussed in the text. The frequency of the T allele
is higher in individuals of light hair color.
19.

| | | | | | |
|---|---|---|---|---|---|
| MC1R | MC1R_6 | 217440 | 632 | x67594 | POLY |

JUSTIFICATION: This SNP is only found to be a var-
iant in African Americans, and absent in Cauca-
sians, and the former have darker mean hair color
than the latter.
20.

| | | | | | |
|---|---|---|---|---|---|
| MC1R | MC1R_7 | 217441 | 646 | X67594 | POLY |

217441 MC1R_5

| | | | |
|---|---|---|---|
| | CC | CT | TT |
| BLACK | 4 | 0 | 0 |
| BROWN | 53 | 12 | 0 |
| AUB/RED | 4 | 3 | 0 |
| BLOND | 12 | 2 | 0 |

JUSTIFICATION: This SNP is part of the MCR3LOC105
haplotype system, the utility of which was
described in the text. In particular, the fre-
quency of the T allele is dramatically higher in
the RED/AUBURN class than in the others.
21.

| | | | | | |
|---|---|---|---|---|---|
| MC1R | MC1R_14 | NULL | 1048 | X67594 | POLY |

JUSTIFICATION: This SNP is only found to be a var-
iant in African Americans, and absent in Cauca-
sians, and the former have darker mean hair color
than the latter.
22.

| | | | | | |
|---|---|---|---|---|---|
| MC1R | MC1R_15 | 217450 | 1272 | x67594 | POLY |

JUSTIFICATION: This SNP is only found to be a var-
iant in African Americans, and absent in Cauca-
sians, and the former have darker mean hair color
than the latter.
23.

| | | | | | |
|---|---|---|---|---|---|
| TYRP | TYRP_3 | 217485 | 21693 | AF001295 | POLY |

217485 TYRP_3

| | | | |
|---|---|---|---|
| | GG | GT | TT |
| BLACK | 0 | 1 | 2 |
| BROWN | 7 | 18 | 18 |
| AUB/RED | 0 | 2 | 1 |
| BLOND | 2 | 2 | 2 |

JUSTIFICATION: The ratio of GG:GT:TT genotypes is
7:19:20 in persons of darker hair color (brown and
black) but 2:4:3 in persons of lighter hair color.
The G allele is therefore more frequently found in
persons of darker hair color.
24.

| | | | | | |
|---|---|---|---|---|---|
| TYRP | TYRP_4 | 217486 | 21970 | AF001295 | POLY |

217486 TYRP_4

| | | | |
|---|---|---|---|
| | AA | AT | TT |
| BLACK | 0 | 2 | 2 |
| BROWN | 6 | 33 | 23 |
| AUB/RED | 0 | 2 | 2 |
| BLOND | 1 | 5 | 2 |

JUSTIFICATION: The ratio of AA:AT:TT genotypes is
6:35:25 in persons of darker hair color (brown and
black) but 1:7:4 in person of lighter hair color.
Thus, the frequency of the A allele is greater in
persons of lighter hair color.
25.

| | | | | | |
|---|---|---|---|---|---|
| TYRP | TYRP1E1E2_357 | 869787 | 6824 | AF001295 | POLY |

JUSTIFICATION: This SNP is only found to be a var-
iant in African Americans, and absent in Cauca-
sians, and the former have darker mean hair color
than the latter.
26.

| | | | | | |
|---|---|---|---|---|---|
| TYRP | TYRP1E1E2-5_38 | 869743 | 5695 | AF001295 | POLY |

JUSTIFICATION: This SNP is only found to be a var-
iant in African Americans, and absent in Cauca-
sians, and the former have darker mean hair color
than the latter.
27.

| | | | | | |
|---|---|---|---|---|---|
| TYRP | TYRP1E1E2-5_{—} | 869745 | 5964 | AF001295 | POLY |
| | 307 | | | | |

JUSTIFICATION: This SNP is only found to be a var-
iant in African Americans, and absent in Cauca-
sians, and the former have darker mean hair color
than the latter.
28.

| | | | | | |
|---|---|---|---|---|---|
| TYRP | TYRP1E4_499 | 886937 | 11204 | AF001295 | POLY |

886937 TYRP1E4_499

| | | | |
|---|---|---|---|
| | GG | GT | TT |
| BLACK | 3 | 2 | 0 |
| BROWN | 56 | 6 | 0 |
| AUB/RED | 7 | 0 | 0 |
| BLOND | 15 | 4 | 0 |

JUSTIFICATION: The ratio of GG:GT:TT genotypes in
persons of darker hair color is 59:8:0 but 22:4:0
in lighter hair persons. Though not significantly
different, this SNP is part of the TYR3L105 haplo-
type system, the utility of which was described in
the text.
29.

| | | | | | |
|---|---|---|---|---|---|
| TYRP | TYRP1E6_354 | 886938 | 17112 | AF001295 | POLY |

[NO TABLE OR JUSTIFTCATION]
30.

| | | | | | |
|---|---|---|---|---|---|
| OCA2 | OCA2DBSNP_ | 165011 | 13651545 | DBSNP | POLY |
| | 165011 | | | | |

712055

| | | | |
|---|---|---|---|
| | AA | GA | GG |
| BLACK | 4 | 0 | 0 |
| BROWN | 55 | 11 | 1 |
| AUB/RED | 6 | 1 | 0 |
| BLOND | 8 | 4 | 0 |

JUSTIFICATION: The ratio of AA:GA:GG genotypes in
persons of darker hair color is 59:11:1 but 14:5:0
in lighter hair persons. The G allele is therefore
more frequently found in individuals of light
hair.
31.

| | | | | | |
|---|---|---|---|---|---|
| TYR | TYRSNP_16 | 87780 | AP000720 | MULTIPLE | POLY |
| | | | | | CYS_TYR |
| 217480 | | | | | |

| | | | |
|---|---|---|---|
| | GG | GA | AA |
| BLACK | 4 | 1 | 0 |
| BROWN | 60 | 3 | 0 |
| AUB/RED | 6 | 1 | 0 |
| BLOND | 17 | 2 | 0 |

JUSTIFICATION: The ratio of GG:GA:AA genotypes in
persons of darker hair color is 64:4:0 but 23:3:0
in lighter hair persons. Though the frequency of
the A allele is slightly higher in the light hair
group, this SNP is part of the TYR3L105 haplotype
system, the utility of which was described in the
text.
MARKER 712060

| | | | | | |
|---|---|---|---|---|---|
| | | LOCA- | | INTE- | |
| SNPNAME | MARKER | TION | GENBANK | GRITY | SOURCE |

| | | | | | |
|---|---|---|---|---|---|
| OCA2DBSNP_{—} | 712060 | 165011 | 13651545 | POLY | DBSNP |
| 165011 | | | | | |
| MARKER 712056 | | | | | |
| OCA2DBSNP_252 | 712056 | 252 | 13651545 | POLY | DBSNP |
| MARKER 217480 | | | | | |
| TYRSNP_16 | 217480 | 87780 | AP000720 | POLY_FL | |
| DBSNP_SNIPDOC_{—} | | | | | |
| RESEQ | | | | | |
| MARKER 886943 | | | | | |
| TYRP1E7_420 | 886943 | 20656 | AF001295 | POLY | RESEQ |

MARKER 710
DCT1028805 at position 3146161 in public DCT se-
quence NT_009952
MARKER 702
DCT1028806 at position 3146003 in public DCT se-
quence NT_009952
MARKER 650
DCT2892681 at position 3165290 in public DCT se-
quence NT_009952
MARKER 675
DCT2031527 at sequence 3141513 in public DCT se-
quence NT_009952
MARKER 217486

| | | | | | |
|---|---|---|---|---|---|
| GENE | MARKER | SNPNAME | LOCATION | GENBANK | SOURCE |

| | | | | | |
|---|---|---|---|---|---|
| TYRP | 217486 | TYRP_4 | 21970 | AF001295 | RESEQ |
| MARKER 886937 | | | | | |
| TYRP | 886937 | TYRP1E4_499 | 11204 | AF001295 | RESEQ |

[0831] TABLE 18-2
Genetic feature extraction table for variable HAIR color shade.

| | | | SNP | # | SELECTED HAPLOTYPE | |
|---|---|---|---|---|---|---|
| | CANDIDATE | SNP | COMBOS | HAPLOTYPE | FEATURE | |
| GENE | SNPs¹ | FEATURES² | TESTED³ | FEATURES⁴ | NAME, FEATURE Ids⁵ | P-value |
| AP3B1 | 6 | | | | | — |
| ASIP | 18 | 2 | 5 | 1 | ASIP-A(559\|560) | 0.027 |
| DCT | 20 | 0 | 15 | 0 | N/A | — |
| MC1R | 16 | 3 | 4 | 1 | MC1R-A (217438\|217439\|217441) | 0.018 |
| OCA2 | 36 | 10 | 152 | 4 | OCA2-A, (712060\|886892\|886896) | 0.012 |
| | | | | | OCA2-B, (217455\|712057\|886894) | 0.022 |
| | | | | | OCA2-C, (217458\|712056) | 0.001 |
| | | | | | OCA2-D, (712054\|886895) | 0.016 |
| SILV | 14 | 0 | 0 | 0 | — | — |
| TYR | 43 | 0 | 20 | 0 | — | — |
| TYRP1 | 28 | 11 | 55 | 1 | TYRP-A, (217486\|886937) | 0.090* |
| TOTAL | 181 | 40 | 233 | 7 | 17 SNPs in 4 genes | |

¹OCA2 gene: Markers 217455, 712057, 712060, 886896, 712054, 712056, 217458, 886895, 886892, and 886894
²TYR gene: none found.
³TYRP gene: Markers 217485, 217486, 886943
⁴DCT gene: Markers

[0832] TABLE 18-3

| | HAPLOID | | | | | | |
|---|---|---|---|---|---|---|---|
| GENE | FEATURE | POS. | MARKER | FCA(minor) | TYPE¹ | SOURCE² | HISTORY |
| ASIP | ASIP-A | 1 | 559 | 0.02 | exon* | resequencing | None |
| ASIP | ASIP-A | 2 | 560 | 0.12 | exon* | resequencing | None |
| MCIR | MC1R-A | 1 | 217438 | 0.07 | VAL_MET | literature | None |
| MCIR | MC1R-A | 2 | 217439 | 0.07 | ARG_CYS | dbSNP, literature | Hair color³ |
| MCIR | MC1R-A | 3 | 217441 | 0.07 | ARG_TRP | literature | Hair color³ |
| OCA2 | OCA2-A | 1 | 712060 | 0.06 | intron | dbSNP | None |
| OCA2 | OCA2-A | 2 | 886892 | 0.03 | intron | dbSNP | None |
| OCA2 | OCA2-A | 3 | 886896 | 0.34 | Intron | resequencing | None |
| OCA2 | OCA2-B | 1 | 217455 | 0.42 | Silent | dbSNP | None |
| OCA2 | OCA2-B | 2 | 712057 | 0.18 | intron | dbSNP | None |
| OCA2 | OCA2-B | 3 | 886894 | 0.32 | Intron | resequencing | None |
| OCA2 | OCA2-C | 1 | 217458 | 0.29 | Silent | dbSNP | None |
| OCA2 | OCA2-C | 2 | 712056 | 0.02 | intron | dbSNP | None |
| OCA2 | OCA2-D | 1 | 712054 | 0.37 | intron | dbSNP | None |
| OCA2 | OCA2-D | 2 | 886895 | 0.13 | Intron | resequencing | None |
| TYRP | TYRP-A | 1 | 217486 | 0.45 | SER_THR | resequencing | None |
| TYRP | TYRP-A | 2 | 886937 | 0.05 | intron | resequencing | None |

¹SILENT - no amino acid change, INTRON —SNP was found in non-coding sequence.
²DbSNP - candidate gene sequence is present in the NCBI:dbSNP as of Feb. 15, 2002. resequencing - SNP sequence was discovered from the re-sequencing effort described in the text.
³Valverde et al., 1995; Frandberg et al., 1998 and Schioth et al., 1999.
*coding change status not yet known as of the time of patent submission.

1-20. (canceled)

21. A method for inferring eye color or eye shade of a non-albino human subject, the method comprising identifying in a nucleic acid sample of the subject a nucleotide occurrence of at least one nucleotide position of the sequence set forth in SEQ ID NO:225, wherein the at least one nucleotide position is selected from:
position 132483, position 141832, position 114220, position 114307, position 418566, position 113047, position 75403, position 144364, position 193050, and position 108632, wherein identification of the at least one nucleotide occurrence allows an inference of eye color or eye shade,
thereby inferring eye color or eye shade of the non-albino human subject.

22. The method of claim 21, further comprising identifying a nucleotide occurrence of at least one additional nucleotide position of the sequence set forth in SEQ ID NO:225, wherein the at least one additional nucleotide position is selected from:
position 21065, position 147364, position 67333, position 147516, and position 18680.

23. The method of claim 21, further comprising identifying a nucleotide occurrence at nucleotide position 84355 of the sequence set forth in SEQ ID NO:225, wherein identification of the nucleotide occurrence at nucleotide position 84355 strengthens the inference of eye color or eye shade.

24. The method of claim 21, comprising identifying the nucleotide occurrence at:
a) positions 132483, 141832, 114220, and 114307 of the sequence set forth in SEQ ID NO:225;
b) positions 84355, 418566, and 113047 of the sequence set forth in SEQ ID NO:225;
c) positions 75403, 144364, 210654, and 147364 of the sequence set forth in SEQ ID NO:225;
d) positions 193050, 67333, and 147516 of the sequence set forth in SEQ ID NO:225; or
e) positions 108632, 108680, and 147516 of the sequence set forth in SEQ ID NO:225.

25. The method of claim 21, further comprising identifying at least one additional nucleotide occurrence selected from:
a) a nucleotide occurrence at position 27585, 8298, or 32086 of the sequence set forth in SEQ ID NO:226;
b) a nucleotide occurrence at position 11359, 14903, 16220, 1084, 224, 4998, 5463, 14820 or 15939 of the sequence set forth in SEQ ID NO:227;
c) a nucleotide occurrence at position 915, 1092, or 1119 of the sequence set forth in SEQ ID NO:228;
d) a nucleotide occurrence at position 880, 429, 1381 or 3037 of the sequence set forth in SEQ ID NO:229;
e) a nucleotide occurrence at position 11799, 8481, or 8699 of the sequence set forth in SEQ ID NO:230; and
f) a nucleotide occurrence at position 106523, 107830, 118064, 50575, 1080, or 107348 of the sequence set forth in SEQ ID NO:230.

26. The method of claim 25, comprising identifying the nucleotide occurrence at:
a) positions 27585, 8298 and 32086 of the sequence set forth in SEQ ID NO:226;
b) positions 113595 and 14903 of the sequence set forth in SEQ ID NO:227; or
c) positions 915, 1092, and 1119 of the sequence set forth in SEQ ID NO:228.

27. The method of claim 25, comprising identifying the nucleotide occurrence at:
a) positions 27427 and 2543 of the sequence set forth in SEQ ID NO:226;
b) positions 429 and 3037 of the sequence set forth in SEQ ID NO:227;
c) positions 15939, 4998, and 5463 of the sequence set forth in SEQ ID NO:227; or
d) positions 11799 and 8481 of the sequence set forth in SEQ ID NO:230
e) positions 106523 and 107830 of the sequence set forth in SEQ ID NO:231.

28. The method of claim 21, wherein identifying a nucleotide occurrence of at least one nucleotide position of the sequence set forth in SEQ ID NO:225 comprises identifying a pigmentation-related haplotype allele.

29. The method of claim 28 wherein the pigmentation-related haplotype allele is an OCA2-A, OCA2-B, OCA2-C, OCA2-D, or OCA2-E haplotype allele.

30. The method of claim 25, wherein identifying at least one additional nucleotide occurrence comprises identifying a pigmentation-related haplotype allele.

31. The method of claim 30 wherein the pigmentation-related haplotype allele is a DCT, TYRP1, MC1R, ASIP, TYR or SILV haplotype allele.

32. The method of claim 31, wherein the pigmentation-related haplotype allele is a DCT-A, DCT-B, TYRP1-A, TYRP1-B, MC IR-A, ASIP-A, TYR-A or SILV-A haplotype allele.

33. The method of claim 28 or 30, further comprising using a matrix or contingency table created using a feature modeling alogorithm for inferring eye color or eye shade.

34. The method of claim 33, wherein the feature modeling algorithm is a quadratic classifier, performs correspondence analysis, or is a quadratic classifier and performs correspondence analysis.

The application's sequence listing, which the Patent Office published only in electronic form, follows.

SEQUENCE LISTING (231 sequences)

SEQ ID NO: 1 - DNA, 1292 bp, Homo sapiens 702
  misc_feature (609)..(609): n = a or g
tctctttccagacacaacaaatggtaccggtgccaggtaacaaatgcaggtccttgatgtgagaaatctatggccctgtaggggcgtcctggtcctgaaacaattgggaaacatattagagatgacagaatagaattttttaaaatgttaaatcttacctgggctgtatctatagagccaataagtccatgatgttttatagtagtaagaaaaaaaagttttgttgttatttatatctccaaaagcaatagtaatgacatgaatttcagaagtaactagtacttttaggataaaccctcctttatctcttaaaaggttgatttctagcagagatccaggaaattcaggtgactttcaggattgggagcccctgatacatatttaatttgtaagcaacaatccattcaggtgaaatagactatccaaaagaatagatcattaagacctaaaggaaatatattttttaaaggcatttgctaacctatgcttcacaaagatataaatttaaaagggagggattaattaataatattgtaacttcaactgcacttagtcctaatgcagtatttatgtaaccaaaaagaactttcgcgtattttgcctcacccntcaatctgttataactactagctgacaagcatgttcgctgagaccagaagagagaaaaatacattcaagccatttaggctggacactggaactgccaattttagtgaaaagctctggacgatttaatgacctccttactgcctggtccatccttcttccctttttcataacagctttgatggttatgtggaaactttagctaactttagttcttgtccaaaatacctataacaacttcagagagctgaacagacgtgaatataaatttaattcgtagctatgaccagaaactaggactttcttttcctcttgagagagtactctctcataaagcaataattcctcagagtgataacaggaaaactataaaggtttatagccaaaagagcctccttatctatcgataaagacagacagatgcttacctgtaaggcaagttttaaaagactcacactgagaaaagcactgctgtccctgatgttggctacacggccctttttcatgttcaattcagagcaaggtttcaaattctcagaacccaacaacgagagggtatcaattgaaggggaacaagtgatgagcagaaggatgaacctgtccaaatcagaatcttgctcttcaaagtgagcttgatgtcttcattcatcctgaccccaatgaaggaccccaaaaatggggagagg

SEQ ID NO: 2 - DNA, 1001 bp, Homo sapiens 650
  misc_feature (501)..(501): n = c or g
gggtttgcactcttatgagaatctaatgctgctgatctgacaggaggcggagctcaagtgataatgctcaattgcttaccatccacctgctgtgtggcccagttcctaagaggccacagaccagcatgggcccatggcccaggggttggggacccctgctttacaccaccacactgtagtacaaccttcaggaccaactagaataagaaaaattgattttgaaggcatattctccaatcttaacaatgcagaaagaggatactttgacctatgagtcctaaaccaatcatgaacttttagatactgtctgagttcaagtcagggttcaaattgtgatgacagaaagagacaagagactatcaggacacaaggaagatgcagaatcagtgctgtaagaggcaaataacttatagaaagtatcagaattcaccaagggaaaaatgtaaataataaaggagaaggcaagatcctaaggcaattagtaatctggagagataaaanaataggggaaaataataaggaggaattgaaattgtagctctcaggagggctataaaacatacaataaatgctctagtaaggctgcacacagtggctcatgcctgtaatcccagcactttgggaagctgaggcaagaggatcacatgagcccaggagttcgagaccagccccagcaacagagtgagaccccatttctacaaaaatttaaaaattagctaggtgtgatagtgtgtgcctgtggtcccagctacttgaggctgagatgcgaggatcatttgagccctggaagtcaaggctgcagtgagctatgattgtgccactgcactccagcctgagtgacagagcgagatactgtctcaacaacaacaacaacaacaacaacaaagctctagtaagaactatatacagagtacccaaattatagaatgtaagtttttttgaaaagactggtacatgctgagaaaatgcaaagcatccaatgaacaaaatgctacaagcaa

SEQ ID NO: 3 - DNA, 630 bp, Homo sapiens 675
  misc_feature (256)..(256): n = c or t
ttctactcttcccaagactaacaatgtttttgaatagtttaagttaaacattaaaatgtacattgattcctggagataattaaatacaaactatttatttaacaaatatttatgaagcggctactatctcatcagatgctatgcaagatgcttcgttttatggaccttgaagtctattttccctggggcaaccttactaaaactgtatgtattaaaaacagatttgattaaaacatatcacctactatgacagtanaggaatggaacactgttttgagaactgagtgaacaaaatgctgtgtctaaagaagagtagctacccagattaaaattcagtcaaatttccagctgcctatctatagctgattggaggtaaatgtctagtcacttctctgcagtagaagagtaattccttgcttcataatgctgagaaatttggatgataataatgtcggtagaggttcattgattgtaaccctggtttgcggatgttgctagtggaagattgcagagtgtgggggagaaggtagatgggaattttttgtactttctccccaatttcaatgtgaatccaaaactgatctaaaataataaagtctcaatatttaaaaatattaataaataacacac

SEQ ID NO: 4 - DNA, 1270 bp, Homo sapiens 217438
  misc_feature (442)..(442): n = g or a
ggagagggtgtgagggcagatctgggggtgcccagatggaaggaggcaggcatgggggacacccaaggccccctggcagcaccatgaactaagcaggacacctggaggggaagaactgtggggacctggaggcctccaacgactccttcctgcttcctggacaggactatggctgtgcagggatcccagagaagacttctgggctccctcaactccacccccacagccatcccccagctggggctggctgccaaccagacaggagcccggtgcctggaggtgtccatctctgacgggctcttcctcagcctggggctggtgagcttggtggagaacgcgctgktggtggccaccatcgccaagaaccrgaacctgcactcacccatgtactgcttcatctgctgcctggccttgtcggasctgctggtgagcgggassaacntgctggagacggccgtcatcctcctgctggaggccggtgcactggtggcccgggctgcggtgctgcagcagctggacaatgtcattgacgtgatcacctgcagctccatgctgtccagcctctgcttcctgggcgccatcgccgtggaccgctacatctccatcttctacgcactgygctaccacagcaycgtgaccctgccgygggcgcsgcrasscgttgcggccatctgggtggccagtgtcgtcttcagcacgctcttcatcgsctactacgaccacgtggccgtcctgctgtgcstcgtggtcttcttcctggctatgctggtgctcatggccgtgctgkacgtccacatgctggcccgggcctgccagcacgcccagggcatcgcccggctccacaagaggcagcgcccggtccaccagggctttggccttaaaggcgctgtcaccctcaccatcctgctgggcattttcttcctctgctggggccccttcttcctgcatctcacactcatcgtcctctgccccgagcaccccacgtgcggctgcatcttcaagaacttcaacctctttctcgccctcatcatctgcaatgccatcatcsaccccctcatctacgccttccacagccaggagctccgcaggacgctcaaggaggtgctgacatgctcctggtgagcgcggtgcacgcgctttaagtgtgctgggcagagggaggtggtgatattgtgtggtctggttcctgtgtgaccctgggcagttccttacctccctggtccccgtttgtcaaagaggatggactaaatgatctctgaaagtgttgaag

SEQ ID NO: 5 - DNA, 1270 bp, Homo sapiens 217439
  misc_feature (619)..(619): n = t or c
ggagagggtgtgagggcagatctgggggtgcccagatggaaggaggcaggcatgggggacacccaaggccccctggcagcaccatgaactaagcaggacacctggaggggaagaactgtggggacctggaggcctccaacgactccttcctgcttcctggacaggactatggctgtgcagggatcccagagaagacttctgggctccctcaactccacccccacagccatcccccagctggggctggctgccaaccagacaggagcccggtgcctggaggtgtccatctctgacgggctcttcctcagcctggggctggtgagcttggtggagaacgcgctgktggtggccaccatcgccaagaaccrgaacctgcactcacccatgtactgcttcatctgctgcctggccttgtcggasctgctggtgagcgggassaacrtgctggagacggccgtcatcctcctgctggaggccggtgcactggtggcccgggctgcggtgctgcagcagctggacaatgtcattgacgtgatcacctgcagctccatgctgtccagcctctgcttcctgggcgccatcgccgtggaccgctacatctccatcttctacgcactgngctaccacagcaycgtgaccctgccgygggcgcsgcrasscgttgcggccatctgggtggccagtgtcgtcttcagcacgctcttcatcgsctactacgaccacgtggccgtcctgctgtgcstcgtggtcttcttcctggctatgctggtgctcatggccgtgctgkacgtccacatgctggcccgggcctgccagcacgcccagggcatcgcccggctccacaagaggcagcgcccggtccaccagggctttggccttaaaggcgctgtcaccctcaccatcctgctgggcattttcttcctctgctggggccccttcttcctgcatctcacactcatcgtcctctgccccgagcaccccacgtgcggctgcatcttcaagaacttcaacctctttctcgccctcatcatctgcaatgccatcatcsaccccctcatctacgccttccacagccaggagctccgcaggacgctcaaggaggtgctgacatgctcctggtgagcgcggtgcacgcgctttaagtgtgctgggcagagggaggtggtgatattgtgtggtctggttcctgtgtgaccctgggcagttccttacctccctggtccccgtttgtcaaagaggatggactaaatgatctctgaaagtgttgaag

SEQ ID NO: 6 - DNA, 1270 bp, Homo sapiens 217441
  misc_feature (646)..(646): n = t or c
ggagagggtgtgagggcagatctgggggtgcccagatggaaggaggcaggcatgggggacacccaaggccccctggcagcaccatgaactaagcaggacacctggaggggaagaactgtggggacctggaggcctccaacgactccttcctgcttcctggacaggactatggctgtgcagggatcccagagaagacttctgggctccctcaactccacccccacagccatcccccagctggggctggctgccaaccagacaggagcccggtgcctggaggtgtccatctctgacgggctcttcctcagcctggggctggtgagcttggtggagaacgcgctgktggtggccaccatcgccaagaaccrgaacctgcactcacccatgtactgcttcatctgctgcctggccttgtcggasctgctggtgagcgggassaacrtgctggagacggccgtcatcctcctgctggaggccggtgcactggtggcccgggctgcggtgctgcagcagctggacaatgtcattgacgtgatcacctgcagctccatgctgtccagcctctgcttcctgggcgccatcgccgtggaccgctacatctccatcttctacgcactgygctaccacagcaycgtgaccctgccgngggcgcsgcrasscgttgcggccatctgggtggccagtgtcgtcttcagcacgctcttcatcgsctactacgaccacgtggccgtcctgctgtgcstcgtggtcttcttcctggctatgctggtgctcatggccgtgctgkacgtccacatgctggcccgggcctgccagcacgcccagggcatcgcccggctccacaagaggcagcgcccggtccaccagggctttggccttaaaggcgctgtcaccctcaccatcctgctgggcattttcttcctctgctggggccccttcttcctgcatctcacactcatcgtcctctgccccgagcaccccacgtgcggctgcatcttcaagaacttcaacctctttctcgccctcatcatctgcaatgccatcatcsaccccctcatctacgccttccacagccaggagctccgcaggacgctcaaggaggtgctgacatgctcctggtgagcgcggtgcacgcgctttaagtgtgctgggcagagggaggtggtgatattgtgtggtctggttcctgtgtgaccctgggcagttccttacctccctggtccccgtttgtcaaagaggatggactaaatgatctctgaaagtgttgaag

SEQ ID NO: 7 - DNA, 435 bp, Homo sapiens 217458
  misc_feature (135)..(135): n = t or c
gatcgacccacctcggaaagtgctgggattacaggcgtgagccaccatgcctgggctgccatttcatttccccttgtttatttccagggcctggactttgccggattcactgcacacatgttcattgggatttgncttgttctcctggtctgctttccgctcctcagactcctttactggaacagaaagctttataacaaggaacccagtgagattgttggtgagtacaagtgcaacctcatgtaggctcagatttcatgaccataatattgtttgtttaccaggagaagttcttattaggaagtatctgttgatgggttgctggatgctcaataccagtgactctccacgtccaccttctagtatacactgttttcagggctgctatcatgagctgtgcctctttagttttcgtgaagtgtactgtccctaaaa

SEQ ID NO: 8 - DNA, 350 bp, Homo sapiens 886894
  misc_feature (193)..(193): n = t or c
tgcgtcgcccggaggctgcacaccttccacaggtaccgggcggggtcctgctcagactgtgcttggtgtgcagcagaacattccatgggcctacaaaatagcgacattagctgtatactaatacrtgatatttaggtgacgcacactgtgctaagcctcttatagtacattttatctaaccctcactgagctntgcagggggtacacagccgagtttaaggaccaaagaaacaacacaaaaccagaggctcagagaatttgagcggcgtgcccagggttgtgcagctcggaaggagtggcactggggatggggctctcactgtcaaccgctgggctgtcccatctctcta

SEQ ID NO: 9 - DNA, 420 bp, Homo sapiens 886895
  misc_feature (228)..(228): n = g or a
gtcactaatgaaaggctgcctctgttctacgagcctgctcactctggcttgtactctctctgtgtgtgtgtggccaggcataccggctctcccggggacgggtgtgggccatgatcatcatgctctgtctcatcgcggccgtcctctctgccttcttggacaacgtcaccaccatgctcctcttcacgcctgtgaccataaggtacgcaaagcacctctgccgtgggngttgcggccaggttctggcaggcaggggctctgcctgcactgcctggctccaggttccattctcaggtgcatgaaaaggtgggggcrgttgagcccacagctcactgcattccagtccagctcgtgtctgctttgtgtgactgcagtacatgctacaagcagtggggcctcagaagctggtggcagaaatgc

SEQ ID NO: 10 - DNA, 420 bp, Homo sapiens 886896
  misc_feature (245)..(245): n = g or a
tggccaggcataccggctctcccggggacgggtgtgggccatgatcatcatgctctgtctcatcgcggccgtcctctctgccttcttggacaacgtcaccaccatgctcctcttcacgcctgtgaccataaggtacgcaaagcacctctgccgtgggrgttgcggccaggttctggcaggcaggggctctgcctgcactgcctggctccaggttccattctcaggtgcatgaaaaggtgggggcngttgagcccacagctcactgcattccagtccagctcgtgtctgctttgtgtgactgcagtacatgctacaagcagtggggcctcagaagctggtggcagaaatgcctgcaggaggtggaagacataggccttgctttcctggagattgtggtctcatggggagacatgtggacaa

SEQ ID NO: 11 - DNA, 512 bp, Homo sapiens 217452
  misc_feature (189)..(189): n = t or c
cctatgtctcacgcctgctgcctgtgctcactgctcttccagctgtgatattgggcgttgggctgaattgttccatttggactctggttaattccatggctgatacagagggaggtcccctaactgttgaccttgtgaacagtaaggtcgttgtttcgttctgcagagagacggtgtccatcagcatcngggcctccytgcagcagacccaggctgtccctcttttgatggctcatcagtacctccgcggaagtgtagaaacccaggtgaccatcgcgacggccatcctcgcgggcgtctaygcgctgatcatatttgaggtaactttcacacctgctcccccgatctgtctgggcccacagtcagggaggcttgagatccgtgagacactctggatgggctcagtcctgactccttaatcaaactggactagtgtcatcattcctaaagattagcgtgtccctctctctaggtagaaagggaaccatacaggaatatttgctgaatcttgg

SEQ ID NO: 12 - DNA, 1283 bp, Homo sapiens 712052
  misc_feature (573)..(573): n = g or a
tctacccgcccggccaaaacagcccctactgccccctggcggcaagcctgtgtacgaggtgtggggaggggaagccacaacaggtagcagttgggtcagggcacctacaagtcatttttattcttaaagctcatttaaagcatttatggtgttcattaaaatatattttgacagcctgggcaacatagcgagacttcatctctaataaaaataaaaaaaattaactcgatgtggtggtgcacgcctatagtcccagctgctcaggaggctgaggaaggaggatcacttgagcctggggatttgaagcttcagtgaactatgatcaggccactgcgctccagcctgggtaacagagcaagatgctctcaccccaccacctctctctctctcttctctttatatatatatgtgtgtatatatatatatgtgtgtgtgtgtgtgtgtatgtatgtgtatatatatatatatatatatataggctcaaattggagaagaaagtgctagaaatccacaccactttcttctaatggcattgcattttgagagagaatagaccagacacctagactttancaacattctcaaagaacaagccatggaaaggctgtgtgcggaggagaaaggacttctgtttgggttatattagtctattagaggtctgagcactgaacttataaaaacctgacttttgaactgaaaaaaagggagcttttatccattcacttccacaaaagtattgcctagggtaatctatgcaattcctgcaggataaagattagcctgtaggcccaattatcataaattcctattaccccaacagaaatgtgttgagtgcctattttgcaggcaaaacgtcttcccttctctccctggtgctgcgttcagcacagaacaaccgcatttggcagcttcactccgacagaggccagtggctccttagagagctgaggtgttccggaggcgcgtgcaccaagcttctgctattcacgctccttggttcctcggaaagagagcgttcggttggaggaatcagtgtgctttttgcttattgacagcctttcttctcttctgaatcactatttgaactgaaggtcattggaagacatgcttttgggagggatatttgtttggaaaaacagacatagctcaaaccctgcaggctctctgaatcttttggtctttgatgagcgggtggcctgccaggcagcgggtgttctggctgctgtgtttgtgccatttgtatttgatcagctgctggggcacttctccctctgactgtgtgt

SEQ ID NO: 13 - DNA, 420 bp, Homo sapiens 886994
  misc_feature (245)..(245): n = a or c
tctgcagggcagggtatacttgctatgttaagttgtatggctctgagcagcactttcagctgctcagtaaataaatgaagaaggaggtcaaggaaaagggtactcaggttgaatcgttgtgtattatttaaattgtctggtgagagctacacatcaaaaattgttttacatattagagtatcccaatatttcaagccattagcttctgattactttgctttttggtgaaataatttccatgattncttcctaaatattgaatatatacacatttacatttttaactggaaccctggggagcttcaccagccagctctggcctccaggatttgtacctgtcctgtcattcagggttggcaagaggagagctcaacatgtaccatgccctgctaatgcagtctagtgctgtgcttgaatata

SEQ ID NO: 14 - DNA, 1400 bp, Homo sapiens 712057
  misc_feature (643)..(643): n = g or t
gagatcgtggatagcccagagtgtctcagcacccctttgagattgtgccctgggcctctgcccagcggtaagtgttgaagctctgaggtttgccccctctggggaggtgtctctgattttatttgcccagacatctccatcctttcaaatacatgaacattcacaacagactcattctggagccaaaccaacgtgagatgcccttgtagggaacagagtgtgggaacgaggggagggcgagggctgctctggtgagcccatggcagtgggcggtgctgttcttcattggaggggtcctagcagatggacccatcaagggaaaggcacaggagcccgagcagggagccagggctgcagagacacctctgtgccctccgaggcgacagtcacaggtcccactgccagccttggtgtgctttgtggcctgatgtagcctgagccagggtcacatagcggcactcaaaatacatttgcccaatgagtgggtgtgtggtctcctgtctggttgtgtgtctgtgtgtgtgcaggtgagtatatggtctcctgtctgtggctgtgtgtcttcgtgtctgcacgtgggtgtatggtcccctgtgcctgctctatgtctgtgtgtgtgcaccagtgtgaactgtgtaggttntgtgtggtcccctgtgcctgctgtatgtctctgtgtgtgcacctgtgtgagctgtgtaggttgtggtcagtgaccatgatgggttgtgcctgtgctttgcggagttattttgggtgagtgccacttttgagtgttgctccaagatggtgtgcatgggcagttgctgggagaccacagtgggtggtaggtgctgctgtgatgggggtgtgactgtggttgtgggcaagggtgggtctgagctgtgtttcatgatgtgcaccagcttagggggtggtgtgctctcccacgcagcctgccctggtgacagggtcccctgtgcatgagatgtgtggctgttgctggctgtttcgtgacctgcacgcgtggcatgtgtgttgtggctctgcgtgcgtgcaggaatgtctgtggccctgggtccgctctcagctgtgacatgtggacagcagggtggtgtacgaagtcagtgctgattgcattgagctgagtacagtcaacttcttaataaccaacccatgagggaggagatctgtgacccagagaaaggaaacctatgctagaaatggaaaaccaattacattgagctctgaaagcatcacgatttgatatttttggctaccaatttgcttccccacttcctactcacatgaatgtgtgtttctgaagccctgctgctcagcagggcctggcaggtgctctgagatttcaaaggaaccgggcagggtgggccaggtctcccctggtccccaagagctgacct

SEQ ID NO: 15 - DNA, 1107 bp, Homo sapiens 712058
  misc_feature (539)..(539): n = g or a
atcattcaggtcattatatgtatttttttgggaaaatagagagtgagcaccttttccagccaacaaatgaagccccaccggccccccatgactagtcctgccagccaggctccaagtcacagaccgcgtccaggcacgaagcgctggggactgctgctccgcgatctcaccacgcagcgtgaccagggaagtaatgagtctcttcttttctcttttagacagatctcacaggaggacaaaaattgggagaccaatatccaagaactccaaaaaaaggtacccagctttctttcctcagggatttctgattcacttctccaagaagagagtgagtgatgccttttccttccctcacgtgactgaatgccgtttctctttttatttctgtggttatacacaagacgttgaggtttatgtgtgtgagtggatggggaaaaatgttttctggatacagcaggctgattttgtgaggatgtggaaagcaaacatctttatagagcctttccctgtccctgcacgttgcagggcccgccctctgncgggtgtccctgaccaccagcccgctcctggccctgaaggcaggcccaaggttcacactttgcggaggggagaccggcaaggcatgctgcatgaagtggagcagctttaggggcagacataggatgcgtgagtgtgctgccgatggctgtgacttcctggggcagagcttgttttcttttgttttgttttttttggctcattcttccatgggggtggactttctcagcccatttatgaacacagaggaccccttcccagtcgagagagctctgctcaagatctgctaggagtcatttgcatctcagtgacatttcagatccatgcagtttgttttctagggagagattgaatacccactctaattttgatgggcacactctccatgcgagtcaggtgtttcctcaaagggcttcagaacacctcacatctatcgtgcttattttccataaagatgttggatgcaatctgatgaggtgcctcagtgccttcacactctgtcccatgtggatggccagggttagaaaagaaaggtatagctgtgatactcttgcaggccccaagttcata

SEQ ID NO: 16 - DNA, 915 bp, Homo sapiens 712060
  misc_feature (418)..(418): n = g or a
tccaattctacattaattcctccactatgagcttccacagtaacctaatcttaccctgagatgtctatatcaaactgcttcctcacatgagggaaggcaccaggtctcgtttacatttttgctctgtatcactacaatacaagagagaatgtgataaaggttgtaacagacccggaaaaaccactctgggagctctaagaagggtagttcatgtaaatacacacacatatacatatagttcatgtaaatatatatatgtatacacacacacacggccttcttcaaggaagagattgctcttaggatgttttcagattgaagatgctgtaaaatttgtattgatgatataaaattaaaaaaaagaaattctgttattgtatattttagatctatcatttccatttggttcttttttctntatcttttgtttcttcccatagtttttcatttttcacttgttccaagagaagttgttaactgattgttgagacatttttaggaaggctgctttaaaatccttttaagataatccagcatccgatatatctcagtgttggcatcaggtgtttgtcctttcccattcaagttgtgattttctcagtttctgatatgacaggtgacttttgattgtatcctggatattttgtctattattttaggagactctgagtcataaataactgttttatttcagcaggcagtcaacctgtttaagtttagcacacaggttatagactatttacatagcctgttgttcaaatgaagatttaattttcagagatcttgcagtgctactttgatctgtttggtttctccagtgctgctgggtgctgccttgggggctggaagggatatccccaggctgggctgcccagatgtctcttcctgtggagaggagtttcaggtctgcagaag

SEQ ID NO: 17 - DNA, 1750 bp, Homo sapiens 712064
  misc_feature (795)..(795): n = g or a
atgaaaataaaaataaaaataaataaataaataaatgaaagaaagaaagaaagagaaaggacctggtgcagttatcctttcacacagtgggccggcattcacacggggaccttgttaacagggcaggcctaccaggtgcccatctgtgcgtgcttccctgccctggccccacgcagccatggcctgtggagcacagtacccttgggcctcatagggagagccccgtctcgtgccgtctcctaggtactcctaggttgatggaggccttgcggaggatgaggtgcctcggggcctgccctccccctatgaccaggtggattctcgcgggtgtcattccagcgctaagagtgcaccccctgcattccaggggcctcatgcatgtcgtgtaaagaacagtgccagagccttatctgggagtcacagttccgtgagaaggctcagctcatggccccacccgcatgcttggcgtggtagagaaaggaacagtgaagacagcataggcccctgtagaaacgccccgtcatcctctgatacctgccggccaggtgtttcataacagggctgtgctactcttgacatctgtgtttatctttcataaagattttgaatgcagtaatcctgaatctgtacgggtttccttgtaacacagtactttgccattttctttcaagttcgagaggttacatttttcatcctcgtgaaatctgtcgtgattccagttgcgtaggttatgacacgctgcaggagtcagaaggttgtgcagagtaaatgagctgtggtttctctcttacagcntaggatatctgacgggattctgctcgccaaatgcctgacagtgttgggatttgttatcttcatgtttttcctcaattcgtttgtccctggcattcatcttgatcttggtgagtctaatttagctttggttcataggctttgtcacattctggatgggaaggtttcagagcctgttcccagacactgactttgcccacaggcagccgggctggtggaaggccagagagggctgagatggagggtgggcagcctgccctgggaagaagggcgcctttccttttggtttcctgggcaggagggagggagagagagatgcatctctggccccttagactctgtgccatgggtcctcagcccctccagggatgaccatgaggaggaatatagagtgggcactgtcctgtctattgtagttaataaccacatctttacatggttcccagaagagatggagccacatgggcaaggccagcgctgccatctgtgccgcctaccatgccagttaggtgacagtctgttcgggagagccctggcgaatggccggtgctctgcagggcccacttgccttgtctgagggtgcatctggcgcatgaaactgttctcccaccgtccaccattggtttctcttctcccacgttcaccacacccatggctctcagacctctccactttctctagcctgtgttgtggccaggacctatccccacctgagatgtggctctctcagggggagctcaccacagagcttgtcaacccctggcctcctccaccctccataaacgttctccactctcccaggcgtttcttatcaatttcacagttatctccattggtatccttattgaaaacaaaacaaaacccaccccacatgaaagtgtaggtttataagaagcataaatttgaggtggtgtcacagtcttttcttttaccaaagctttacccatagttttccttc

SEQ ID NO: 18 - DNA, 1032 bp, Homo sapiens 712054
  misc_feature (535)..(535): n = g or a
cattgacttatttttaaaaatattgctccattgtcgttttgtttatatcttgattttggaagacctgatgtcagtctgattgttttgcgtgcggccttgatgatttttatcttcttccttgaaatcttatagttttactagaacatgtaacagagattttagttttaaatattagcttcattctactatttgtttttttcccttaaggactccaataaacaaatattattccttcattgcccgggttccatttccactactatctctgcccttttaatttatctatttacttattcatttttattctcttacttgctttgatatctttatttagtgacccttgttatattttcatttttgtctattgtcttttgggcatcttttaatttatttctcatttcttttgtaaagtgatttctctgagtacataatagttgttgcatatttatgggggacatgtgatattttgatacaataatacaatatgtaatgatgaaatcagggtaattaggatatccataacctcaaacatttnttgttacttgttttgggaacattccaagtcctttcttccagttattttaaaatatacaataagttattgttaattatagtggccctatcatgctatcaaacactagaacttattacttctaactaaccctattttttgtacccattaaacaaccccttatttctgagaaaacttggttacctcatccttgagttcaatcaactttttatttctccctgttatttgcccatttctgttttcaaatctctgatttaaggtgggtttgtatttttgatgcttgcttgaggcgtgggcatggcgaattcattttgaagtgtgggcttgtagttttcttctacatgcttcatggttattttcagaggggattttcctcagctgatacatgtgacatttccgctcctgatagcgtttgcactagctctgtaggtgtgacttcatttttctcttgttcatttaatgccgttgggcttgtttgtgttttgtaggattcctggcgc

SEQ ID NO: 19 - DNA, 910 bp, Homo sapiens 712056
  misc_feature (554)..(554): n = t or c
aatagcaaaggtggcctgaatctcctgctaatgcaaaagtgagcctaaaagtgtcatcccatagtatttggtctcctgtgcgagtttctgccatgcattttcaattgagttggggagaagaggtctttcttatggtgtcttctaaaacttcagccttttacaattcagacagacccttaggcaaatttccttgtaagatttatcactgaatcttgggcacattcttgaatctagcacctgagtgctgggaacacatacattatttctgtgttggtgattctgtttcctaccctgtctctttcaggtctcactcttctttgccccagatgtccagctccaggtctaaagattcctgctttacagaaaacactcctttgctgaggaattccttacaggagaaagggtgagatattttccccctcatatgaaagtaagagtttctgagcattgcacctggcatgtatgctggagaacttgagacacgaatttttattggacatgtttaacctctgccagatccttgacaatttattgtagtagatgttcatgattcnggtggttatattctgtggatattaatttccagatggccttgagcataaccctgcagcaactgcacagcacacacgcacactcatgcatgcacaaagctctgatgggctgtcttaccaggctggggtttctcagctaggggtgaggttggcattgtctggagacacttttggttgtcacactgagggctgagatgcttctggcatctaagggtagaggcaagggatgctccaaacattctgcaatgcacaggacagcccccaccacaaagaattatccagcacaaatgtcagtagtgacgaagttgagaaaccctgtatatgtgtttcacaagaaaactcaatttcctgcaaacttg

SEQ ID NO: 20 - DNA, 420 bp, Homo sapiens 886892
  misc_feature (210)..(210): n = g or c
gctgcaggagtcagaaggttgtgcagagtaaatgagctgtggtttctctcttacagcataggatatctgacgggattctgctcgccaaatgcctgacagtgttgggatttgttatcttcatgtttttcctcaattcgtttgtccctggcattcatcttgatcttggtgagtctaatttagctttggttcataggctttgtcacattctgnatgggaaggtttcagagcctgttcccagacactgactttgcccacaggcagccgggctggtggaaggccagagagggctgagatggagggtgggcagcctgccctgggaagaagggcgcctttccttttggtttcctgggcaggagggagggagagagagatgcatctctggccccttagactctgtgccatgggtcctcagcccctcca

SEQ ID NO: 21 - DNA, 453 bp, Homo sapiens 217455
  misc_feature (225)..(225): n = g or a
caagcagcttcccttagatggcacgttggtggtagctgtatgtgtctgtggggtgtccaggcctgaaacatcaagacccatgacttatcatttgaatagatgtggtacagtggcagatatagaccccctcatgaccacacagctttcgtgtgtgctaactccctcgtgcactggaacgcggtaatttcctgtgcttctttccagatcgtgcacagaactctggcngccatgctgggttcccttgcagcactggcagcactggctgtgattggcgatgtaagttgtcacagtcccaatccctggcttaccactcagtgggatgtcagctcaaagatgttccaggattcaggctttcgtggttttttcactattttatatgccacgtccatgtttttgcccaagaaccatgctagaggtatgaactaacaagctacagcattgaagagtactttt

SEQ ID NO: 22 - DNA, 870 bp, Homo sapiens 712061
  misc_feature (170)..(170): n = t or c
acacagtggcagatatagaccccctcatgtccacacaggctttcgtgtgtgctaactccctcgtgcactggaacgcggtaatttcctgtgcttctttccagatcgtgcacagaactctggcggccatgctgggttcccttgcagcactggcagcactggctgtgattggnagtgggatgtcagctcaaagatgttccaggattcaggctttcgctggttttttcactattttatatgccacgtccatgtttttgcccaagaaccatgctagaggtatgaactaacaagctacagcattgaagagtacttttcattaggttttgtcacacactcacatcccagtggtgtgattcctcatcgtggtggaggaaaggctcctcatgggcatgtttgcctagggctgtggagctgggttgtgatggggctggatctgggtgttggaactagaggggaccgtcctagctggtgcagaaaggtgggagtcagttgggccagggtctgtcctgaagagatcaggaggcccctggagaggcgtgtttggggatgagggtgtcctgtttgggtctgagcagggcctctctggcagggacatgggaaacaaatgtagggaaacaacagagaccagtggccactggggatggaggcccagagttgtctgagaggcagtgctggaacccagctgagagtgggacagctgccatgccagttcctgtcatctggtctcaggcacggcactgcagagagcacatacagactccactcggaatgtaaccaggggccagtcccgccatgtgggagctgccagaggcaggggctagaaaaaactttattactaaatgcatagatttgacattatagatgccctgggtc

SEQ ID NO: 23 - DNA, 350 bp, Homo sapiens 886938
  misc_feature (172)..(172): n = t or c
ccctgctgttcgaagtcttcacaatttggctcatctattcctgaatggaacagggggacaaacccatttgtctccaaatgatcctatttttgtcctcctgcacaccttcacagatgcagtctttgatgaatggctgaggagatacaatgctggtaagacattttcatatgcnttttgcatgctcagctgggcrgattgtttagatggcatagttatcagttcaagctgagcactcagcgcataaaaacactttcaaaataaggatagcatagctgtaatatcaagtcacttccagacattcaattctactttgaaaatgcaggcaagaagtctctccaaatagttattat

SEQ ID NO: 24 - DNA, 420 bp, Homo sapiens 886943
  misc_feature (216)..(216): n = t or c
tggtgccattctggcccccagtcaccaacacagaaatgtttgttaytgctccagacaacctgggatacacttatgaaattcaatggccaagtgagtgttgaaagtgtatttttactgtgataatttccaaaarcaaatgtgttatctttcaagtagagtaatcacggtattctgaagctatgttttccatttggacttggaaactttcatttgtanttttatttgaggataagggaaggaatttgatatttgttgagagtccacactaagctgatattgatcttattgtacagcaccctatctcatttaatcctcacaatgctttggggtgagtatgaaaatcttcatttcacaaataaggaagctgaggcttaaataggttaactgttacagattcacatttctaatgagggaagagaa

SEQ ID NO: 25 - DNA, 121 bp, Homo sapiens 560
  misc_feature (61)..(61): n = a or g
tcatctcggagcttctcctcaggtggcaggtggctgttggcagtgaagaagcagaggaagnccagcagggtggccaggagtaagcgggtgacatccatcccaggaggcctgagtgggacag

SEQ ID NO: 26 - DNA, 401 bp, Homo sapiens 552
  misc_feature (201)..(201): n = a or g
aatccagctagcaaataaataaatacataaatccagggggcctatgtcaacagctccatcctcctgacacaaactatacctgcattcgttctctctgggtttgggaatctaggatatgagccaacatatatgcttgtctgaaggggccacttacctcttcatctttctcactgagacttaatttattagccttattctgtncatcttaataaaatctctgctactgtgaggccctactgggggcctttcaacaactctgcccaggcctggggtctcctggggccacagacattaaaaaaacacacagaagcagccaacacaccaccctctggacagcagagaccagtgcaatgcattgctttttctctttgctccaatctccttctgttccttgtctttct

SEQ ID NO: 27 - DNA, 401 bp, Homo sapiens 559
  misc_feature (201)..(201): n = g or a
tgccaccagtctaataagcagcttagcatatggtagaggctctgaaaggcctgaagttaagacacttggtgaactttgtttaatttagcatttctgaaacttaatgaatcacagaactcctgtcaacagtaacaaacttcaggaaatgctccagaacatatgcaagtctgggatggaccagtcctgtcatgtcagggttgngaatgaaggctcaggggaaaatatgaggggcactggagcctggcattggagatctggtttgacttcacctgataataatcatagacatactgtgtggtaggcactgtgaggtgagtatggtctttattcatatttcacagttgaggaacttgaggcttaggagaattaagtaactagcacggatcacacagtttttaact

SEQ ID NO: 28 - DNA, 401 bp, Homo sapiens 468
  misc_feature (201)..(201): n = t or c
caaatcaggtcctcctggctccagagctctcaggaatggaaaataggaaacacaggtgcatctgtgtacaagacaggagtccattttctgggtatcacaatgttcctgtgcctgccacaatggagatgaaggaaggggcacctggggtggctctgagtggcccaagctcacttaggtcgagggaccaggccccacaagagngtcacaggcagatcccagtgcctgcttggatttcccatttgccttccctcagaggacacgttgctatcagtgcctggctccaggtcagtagccgggctaacaagaacctactggcttgagtcctacagtgtgactcatccagcacgcttcttctcctctccctgaccttgtgacttcccaagccccctctgcccctctca

SEQ ID NO: 29 - DNA, 540 bp, Homo sapiens 657
  misc_feature (356)..(356): n = t or c
ttggctattgtaagtaatgctgctatgaacatgggtgtgcaaatatctctgctggaccttgctttcagttcttttaggtataccagaagtataattgctgggtcatatggtaattatttgttccatttttttgaggaatccccatactgttttccatagtggctgcaccattttacattcccaccagcaatgcacaaggattccaatttctctacaccctcagcaacacttactattttctatttttttttgatagcagtcatcccaatgggtatgaggtggtatcttattggggtttctgcctggcatctaaggccctctgtacctaggctctttcataaatttgaacttaattngaggtaattctctgcccaagcgtcccactacagccaggcttgaaagactcaggtcaaagagagagagactgagctctgaaatcatcttgattgctttctaggctgagactttgggtaaataggctgtgtgatttttcaccttcttgattaagattttttaaattgttttgtttttgtttttttg

SEQ ID NO: 30 - DNA, 636 bp, Homo sapiens 674
  misc_feature (599)..(599): n = c or t
ggagaaagaaccaaggtgatgctagaagagattctagacagagactaagctacctctcaggccattcttgactaaacaatcatgaaaactctaggagagagttgctcaactcaatgctagaaccatcttagatttgtatgtaagttgtggtttgttattatattcatattttatcagaatgaattggatgtaattcataggtttagttcttctcaatatagtatgcatttatccttataaattctagagttgaagagaatccattcaggtgacatttagcacctgtgaaattaaagaaaacaagccagcccccagcctagtccatagaaacactgccaccctggggaaccagagaggggtccagccaccctctctgattcctcagctcttataaaactcatcaagatgttatgccacttaggaggtagtaactgtgtacctgctatttaaaaactagtattgaataagtaaatgtgacatttaaaaagcataaatacatgctcacaatgaaagcaatgactatcatttcaaaagctgtgcaaaattagtcagatctgcccttcaccaattagtgttaattcctattaatatgatctaangggacttaatttcctcagctatagtgaatgcaattgt

SEQ ID NO: 31 - DNA, 681 bp, Homo sapiens 632
  misc_feature (45)..(45): n is any nucleotide
  misc_feature (267)..(267): n = a or c
gaattcgcctccacctcaccaactcacatctttgatgattaacangcttcacagaagaaaagtttacactttgaaccaagaacatacggtagaggagagaacatttaaagtgtctgcatccaatgcacaggaagaaactgcttccttctaactccaggcggtatttgataattctacgactttcataaacctaaggctgccttgtggttgctctcttaattaacttgcatgaaattacttcccactgccataccctcaacccaatcncaaacctgtaataatataccttcagccaaggaaaaaacccacctaataatgtatctctaacagaataataatggagccacacaaaaaaatcataaacactgcagttggcaaactgcggctgggttccattgggcccaagcaggcccagccagtgttgtgtggtgatcacgtagtcggggtgtactctcttcttcgcgagatctaaggcgcccaagaactgctctctttcctgaggactcaaggaatggatgttctgccgaatcactggtggtttcttccgctcgcagttgggaccggtccagccaaacttgcagtctccacaattatagccggcaaagtttcctagttcacaaaacagaaagatggaaaggaagggggtttatgtcgtttggaagaaaattctgattctatcat

SEQ ID NO: 32 - DNA, 121 bp, Homo sapiens 701
  misc_feature (61)..(61): n = a or g
gcccaaatcaactcatatagagtgactatgatggcgaggatcaagatttcgggaagaaaancagttaagttttcaacgatgtatgaatctctctctccaagcaggactataaacccctttg

SEQ ID NO: 33 - DNA, 1292 bp, Homo sapiens 710
  misc_feature (451)..(451): n = g or t
tctctttccagacacaacaaatggtaccggtgccaggtaacaaatgcaggtccttgatgtgagaaatctatggccctgtaggggcgtcctggtcctgaaacaattgggaaacatattagagatgacagaatagaattttttaaaatgttaaatcttacctgggctgtatctatagagccaataagtccatgatgttttatagtagtaagaaaaaaaagttttgttgttatttatatctccaaaagcaatagtaatgacatgaatttcagaagtaactagtacttttaggataaaccctcctttatctcttaaaaggttgatttctagcagagatccaggaaattcaggtgactttcaggattgggagcccctgatacatatttaatttgtaagcaacaatccattcaggtgaaatagactatccaaaagaatagatcattaagacctaaangaaatatattttttaaaggcatttgctaacctatgcttcacaaagatataaatttaaaagggagggattaattaataatattgtaacttcaactgcacttagtcctaatgcagtatttatgtaaccaaaaagaactttcgcgtattttgcctcacccatcaatctgttataactactagctgacaagcatgttcgctgagaccagaagagagaaaaatacattcaagccatttaggctggacactggaactgccaattttagtgaaaagctctggacgatttaatgacctccttactgcctggtccatccttcttccctttttcataacagctttgatggttatgtggaaactttagctaactttagttcttgtccaaaatacctataacaacttcagagagctgaacagacgtgaatataaatttaattcgtagctatgaccagaaactaggactttcttttcctcttgagagagtactctctcataaagcaataattcctcagagtgataacaggaaaactataaaggtttatagccaaaagagcctccttatctatcgataaagacagacagatgcttacctgtaaggcaagttttaaaagactcacactgagaaaagcactgctgtccctgatgttggctacacggccctttttcatgttcaattcagagcaaggtttcaaattctcagaacccaacaacgagagggtatcaattgaaggggaacaagtgatgagcagaaggatgaacctgtccaaatcagaatcttgctcttcaaagtgagcttgatgtcttcattcatcctgaccccaatgaaggaccccaaaaatggggagagg

SEQ ID NO: 34 - DNA, 627 bp, Homo sapiens 217456
  misc_feature (326)..(326): n = g or a
ccagaataccgatggcattacgggactgagggtcatcaccttgtgacaaattaaccatcacaggggctctgtgaaggaagaggatcagaggggtgacagtgctggctagggaggatttagaatgtctaggaacttcgatggccagcactgtctctatctcggcccccctaggactccgtgggtctatgtcttaacccatggggtaatgttagtttggctccctgttcttaaagtcactaatgaaaggctgcctctgttctacgagcctgctcactctggcttgtactctctctgtgtgtgtgtggccaggcataccggctctcccngggacgggtgtgggccatgatcatcatgctctgtctcatcgcggccgtcctctctgccttcttsgacaacgtcaccaccatgctcctcttcacgcctgtgaccataaggtacgcaaagcacctctgccgtgggagttgcggccaggttctggcaggcaggggctctgcctgcactgcctggctccaggttccattctcaggtgcatgaaaaggagggggcagttgagcccacagctcactgcattccagtccagctcgtgtctgctttgtgtgactgcagtacatgctacaagcagtgggg

SEQ ID NO: 35 - DNA, 121 bp, Homo sapiens 656
  misc_feature (61)..(61): n = t or c
tagcagcagtcactggctgcgtctaccccgcatcttctgctcttgtcccattggtgagaanagccccctcctcagtgggcagcaggtctgagtactctcatatgatgctgtgattttcctg

SEQ ID NO: 36 - DNA, 121 bp, Homo sapiens 662
  misc_feature (61)..(61): n = c or t
agggaacaagcacttcctgagaaatcagcctctgacctttgccctccagctccatgacccnagtggctatctggctgaagctgacctctcctacacctgggactttggagacagtagtgga

SEQ ID NO: 37 - DNA, 121 bp, Homo sapiens 637
  misc_feature (61)..(61): n = c or a
cctgtggctcctccccagttccaggcaccacagatgggcacaggccaactgcagaggcccntaacaccacagctggccaagtgcctactacagaagttgtgggtactacacctggtcaggc

SEQ ID NO: 38 - DNA, 425 bp, Homo sapiens 278
  misc_feature (93)..(93): n = a or g
taagtaggaaaagaatttgctgagaggctattgagtagctcacaaaatcatggagcagcaggctcagaaacaggtgagaataagcaagaaggncatcagctaagacagctgccaaaaccatgctatagaacacagggcacttgctgggcaatggattcctttgctggtacatctggctttgctgaccctgaaaactgaatattgttataccaactgccactgcccatttctaggatggtttctgattatccctgcttctttgtgtcactatctcctgtttcgaagtcatgaatgagtatgtcagattggcagaatatttatcatatggtcatactctaactttagaaaaagccgagaaacaaagtttaagtatctaaaccattgtcattggaggtaagctctgtctcccatcaagactcattaag

SEQ ID NO: 39 - DNA, 361 bp, Homo sapiens 386
  misc_feature (114)..(114): n = a or g
ataggccattttgtacatggcaaccatgtgaagagcagtagaatcagaagaagaaaaaaaaaggttttgagacatgactctatcaactgactgtaaggtgacctgggaaattcnctctacatccctgaatctcagtttattcacctgaaatactgggaccagaacacattaaagaattatttagaatgatacattaatgagcctagtacagtgtaacacagggtaaacatccagcagttttggaatcatttttggaagtttcttgctagggttaccaagaaaatttgtagaaatcttgaacttaagtgtagttaataataatagctattataatgtttattgctctatgatgacgatagta

SEQ ID NO: 40 - DNA, 906 bp, Homo sapiens 217480
  misc_feature (558)..(558): n = g or a
  misc_feature (328)..(330): nt. represent ctt insertion variant
  misc_feature (333)..(335): nt. represent ttc insertion variant
tcccatttttctgatgaagaaactgaggctttggagtattaggtgtaactttcccaagctcttacagttaataagtagtagagctggccttcaaacccaggtgtctactccaaaggactgtgaaaggatgaagatgatggtgatcgtaacaatggtggtaacaataaaaacaatgggatgtctttttatttcagacccagactcttttcaagactacattaagtcctatttggaacaagcragtcggatctggtcatggctccttggggcggcsatggtaggggccgtcctcactgccctgctggcagggcytgtgagcttgctgtgnnntcnnngtcacaagagaaagcagcttcctgaagaaaagcagccactcctcatggagaaagaggattaccacagcttgtatcagagccatttataaaaggcttaggcaatagagtagggccaaaaagcctgacctcactctaactcaaagtaatgtccaggttcccagagaatatctgctgrtatttttctgtaaagaccatttgcaaaattgtaacctaatacaaagtntagccttcttccaactcaggtagaacacacctgtctttgtcttgctgttttcactcagcccttttaacattttcccctaagcccatatgtctaaggaaaggaygctatttggtaatgaggaactgttayttgtatgtgaattaaagtgctcttattttaaaaaattgaaataattttgatttttgccttctgattatttaaagatctatatatgttttattggccccttctttattttaataaaacagtgagaaatctacattaactgactcctttaggcttcagaaacacatttttattctcttcagaaaggatgatattcccctttattttacatttctgctccaa

SEQ ID NO: 41 - DNA, 420 bp, Homo sapiens 951497
  misc_feature (221)..(221): n = g or a
tttcatttttttttaatgaacaggatttgctagtccacttactgggatagcggatgcctctcaaagcagcatgcacaatgccttgcacatctatatgaatggaacaatgtcccaggtacagggatctgccaacgatcctatcttccttcttcaccatgcatttgttgacaggttggttaatatttctttataaataacgtgctcattggatttaaataganggtgcctatcaaatgtgatttaagttattaaataaaagctaagaagttatggtagtctattgtctgtgatcaggttgtcaccaaaacagaccttaggctaagaatttgcatgcaaatgtataataaagaaagtgtttataaagataaattaaaagaaggtggattaggcaggatacaaaagaaagaaaagtaaaataag

SEQ ID NO: 42 - DNA, 906 bp, Homo sapiens 217468
  misc_feature (660)..(660): n = a or c
  misc_feature (623)..(625): nt. represent ata insertion variant
  misc_feature (686)..(688): nt. represent tct insertion variant
atcactgtagtagtagctggaaagagaaatctgtgactccaattagccagttcctgcagaccttgtgaggactagaggaagaatgctcctggctgttttgtactgcctgctgtggagtttccagacctccgctggccatttccctagagcctgtgtctcctctaagaacctgatggagaaggaatgctgtccaccgtggagcggggacaggagtccctgtggccagctttcaggcagaggttcctgtcagaatatccttctgtccaatgcaccacttgggcctcaatttcccttcacaggggtggatgaccgggagtcgtggccttccgtcttttataataggacctgccagtgctctggcaacttcatgggattcaactgtggaaactgcaagtttggcttttggggaccaaactgcacagagagacgactcttggtgagaagaaacatcttcgatttgagtgccccagagaaggacaaattttttgcctacctcactttagcaaagcataccatcagctcagactatgtcatccccatagggacctatggccaaatgaaaaatggatcaacacccatgtttaacgacatcaatatttatgacctctttgtctggatscatnnntattatgtgtcaatggatgcactgcttgggggatntgaaatctggagagacattgattttnnngcccatgaagcaccagcttttctgccttggcatagactcttcttgttgcggtgggaacaagaaatccagaagctgacaggagatgaaaacttcactattccatattgggactggcgggatgcagaaaagtgtgacatttgcacagatgagtacatgggaggtcagcaccccacaaatcctaacttactcagcccagcatcattcttctcctcttggca

SEQ ID NO: 43 - DNA, 483 bp, Homo sapiens 217473
  misc_feature (163)..(163): n = g or a
  misc_feature (219)..(221): nt. represent cga insertion variant
tatttttgaagtataaagaatatattcaacatctttccatgtctccagattttaatatatgccttattttactttaaaaattttcaaatgtttcttttatacacaatatgtttcttagtctgaataaccttttcctctgcagtatttttgagcagtggctccnaaggcaccgtcctcttcaagaagtttatccagaagccaatgcacccattggacatnnnaaccgggaatcctacatggttccttttataccactgtacagaaatggtgatttctttatttcatccaaagatctgggctatgactatagctatctacaagattcaggtaaagtttactttctttcagaggaattgctgaatctagtgttaccaatttattttgagataacacaaaactttatgcttcgacaatgttattcctgaacactttaaatcctgaaagtgcattataatccttaatttattaccagtttattatcac

SEQ ID NO: 44 - DNA, 811 bp, Homo sapiens 217485
  misc_feature (364)..(364): n = a or c
  misc_feature (198)..(201): nt. represent aaga insertion variant
  misc_feature (708)..(711): nt. represent aatt insertion variant
tttgtctttttatttttatcttcctttccaaataggtcgggagtttagtgtacctgagataattgccatagcagtagttggcgctttgttactggttgcactcatttttgggactgcttcttatctgattcgtgccagacgcagtatggatgaagctaaccagcctctcctcactgatcagtatcaatgctatgctgnnnnatatgaaaaactccagaatcctaatcagtctgtggtctaacaaatgccctactctcttatgcattagtatcacaaaaccacctggttgaatataatagattgagttattaactgtattttctttcactttattaccttctttctaatacaagcatatgttagnattaaagttctaggcatacttttcaaagctgggaagaccctttcagaatcttttcaatgggttttaattttcagttctatttaaaatggtgaatgacactaaactccatgatatttaaggatagtgtgaagatctttggcatgatttaaaggttgagtatgtgaagatataagtaagtgaactaccatgctttgtttacgtgtaaaggaaaataatgtttgatagtaaatgtccacttaaaatacatgaatgggcatttctaaaatgttaaaacataaacwcatttccattcatggatatttgtcaacagatttaaagaaaaccacagttattaattaaagaannnnaattaattatgtgtagttataaaccaatgaaattttgattaaccttttcaaattaatgttccagtttgaagaccaatcaaatatattatttagtcaacat

SEQ ID NO: 45 - DNA, 996 bp, Homo sapiens 217486
  misc_feature (473)..(473): n = a or t
  misc_feature (26)..(29): nt. represent aaga insertion variant
  misc_feature (536)..(539): nt. represent aatt insertion variant
actgatcagtatcaatgctatgctgnnnnatatgaaaaactccagaatcctaatcagtctgtggtctaacaaatgccctactctcttatgcattagtatcacaaaaccacctggttgaatataatagattgagttattaactgtattttctttcactttattaccttctttctaatacaagcatatgttagmattaaagttctaggcatacttttcaaagctgggaagaccctttcagaatcttttcaatgggttttaattttcagttctatttaaaatggtgaatgacactaaactccatgatatttaaggatagtgtgaagatctttggcatgatttaaaggttgagtatgtgaagatataagtaagtgaactaccatgctttgtttacgtgtaaaggaaaataatgtttgatagtaaatgtccacttaaaatacatgaatgggcatttctaaaatgttaaaacataaacncatttccattcatggatatttgtcaacagatttaaagaaaaccacagttattaattaaagaannnnaattaattatgtgtagttataaaccaatgaaattttgattaaccttttcaaattaatgttccagtttgaagaccaatcaaatatattatttagtcaacatatactatttagtctcaggttcaaggctacaacaaaaatcaccatctttgtcaaactttggagagggaaaatcttcactttcttaagcaacaatggatattgcctgtgtttgccactgtgtttccctgcctctcaattcgctgaaaaaggaactacctatccttacatttcacctactaatgtctcttctaacatcttagaggtccatggagaaggcatatggagaacatgttttatactgctctataaatagtattccaatcactgtgcttaatttaaatagcattmtcttatcatttatcagccttttatgtattttccaagtaaaatattaacatattayttcattggtcttctt

SEQ ID NO: 46 - DNA, 560 bp, Homo sapiens 869787
  misc_feature (314)..(314): n = g or t
ctgtgtctgggcctgggacagaccgctgtggctcatcatcagggaggggcagatgtgaggcagtgactgcagactccyggccccacagccctcagtatccccatgatggcagagatgatcgggaggtctggcccttgcgcttcttcaataggacatgtcactgcaacggcaatttctcaggacacaactgtgggacgtgccgtcctggctggagaggagctgcctgtgaccagagggttctcataggtaagtggagatatgaatgagttcataagtcctgcatgagactcaaggctcttaataaaatcttaaancatttgagctggaggaatacctggaaatcatatagctcaaccctctcttttcatagttgaggaaactgaggcttagaaaggttaagaaacttgtttaatgtaaagggttggagttgaagctcagaacttctgatcaatattttattctgaaacatttattgagcaaccactatatcctaggaactgtgttaggtattatgactagtcaattcagtaactccttcaggtaaacatgttaattgtcat

SEQ ID NO: 47 - DNA, 490 bp, Homo sapiens 869745
  misc_feature (224)..(224): n = t or c
attaattatcaggcagcaatccacatgcacttaacagttctgacgtgagaggacaagaaacacaagcaaatataaaacattcaattctaagagaagttcatcagagacatccttcaggattgtgaggtactggaaagaagtcctatggggagtgggtggacacgtgccaaaactccattagtgtaagggactttaaatcacagaaattaacttgctggaaatcngttcccaattcttccttcagctccaaggttaaattaaatgtaattaatgatggtgacctgctaattcatgcttttgataactgatatctagtatgtatatatatataaacaaaatgacgaggacagggaatttaattatttgggtatcacacatgyaggtgttatatatgccaaattttaaaggtaaawtactacttttattatttgtgtgaaatgtcattttacatatgggttccattttgaaagtggtttgggaagggggcata

SEQ ID NO: 48 - DNA, 350 bp, Homo sapiens 886933
  misc_feature (169)..(169): n = t or c
aatcattttcagaaatgtctgcataatgagttgagtttcattccctctaatgcctaaatgacaccttgtaataaattaccagctttgttaaataaggttttaactcctctgggcccctcagacaccgttgatatactaaccagtaccttattgtctgaagagagctaanagaaatagactgtcagagagtagaccaaacagaaatgaataattgtaaacagaagcagagagtattaatgtggtttctgtgatctaggaaatgttgcaagagccttcyttctcccttccttactggaattttgcaacggggaaaaatgtctgtgatatctgcayggatgacttgatgggat

SEQ ID NO: 49 - DNA, 420 bp, Homo sapiens 886937
  misc_feature (214)..(214): n = g or t
ctccttggaagattatgataccctgggaacactttgtaacagtaagttccaaatgatagcttggagtcagaatttctttttagataawgagattaaatatgttgcctgaaaggccttcattctactagagaattcagactaaaatctacttttattatagagtaacagtgtaccaggcattcattaaacacctagaatgttcaaggtactctanaagttgctccaggggaaacagaaagtgcctacacatttttacactgcctttcttgagtagtttggtcaatatcttgctaactttcttattttggaaatgtctagttgtataaactaatcctcttagttttcttagcactacttagaagtcatgtgtcttgtgttggaatttcacagaaaatgtttcctaagaaaatgtgaaaaata

SEQ ID NO: 50 - DNA, 1680 bp, Homo sapiens 886942
  misc_feature (903)..(903): n = a or g
atatatattattttcaaatctactatttcctggtcagtattcaaggtaccagaaatacgatgctatacaaaattcaccaacaaattttcttcctgaaacttttcttcctgttgataaaattgacaataaccatatgtaaatacatatacagcatgttagatggtggaagtctctatagacaaataaaatcaggaaataggataggcagtactgtgtagatatatggaagaagaatgtcctaagacaaaggaacagggagccaactgtggctggagtagagtggggtctggggagagagtggtgagagatagtaaggtcaaagggataacaggaggcagagctgtatgccacagcaaattacaggtttatgttttctttggctttgaaaaatacatttaatgaattttattcaaattgctttatgtaatttttaaaaattattcaagatcaccataggtgatgaaatactaaaactcccctgcttttaaactctcttttttattaagtggtatattggtactgtattcaaagcattttctgttttatgtaatttctcatcctgctgtagtgaaacttcatatctttattcagtgtaaaataagaataaaattttttcaggttctccttgaatattggatgcctttagaactcaataatgataggaatattaattwtattatgtttattaatacgttgtctttggaataatttagatatatccacatttccattggaaaatgcccctattggacataatagacaatacaacatggtgccattctggcccccagtcaccaacacagaaatgtttgttaytgctccagacaacctgggatacacttatgaaattcaatggccaagtgagtgttgaaagtgtatttttactgtgataatttccaaaancaaatgtgttatctttcaagtagagtaatcacggtattctgaagctatgttttccatttggacttggaaactttcatttgtayttttatttgaggataagggaaggaatttgatatttgttgagagtccacactaagctgatattgatcttattgtacagcaccctatctcatttaatcctcacaatgctttggggtgagtatgaaaatcttcatttcacaaataaggaagctgaggcttaaataggttaactgttacagattcacatttctaatgagggaagagaatgagtttgagcttaggcccatggaatatgccccaatttttctactataccatattgcctgcatttatctatcttaaaggaaaagggagtgagatactcttaggtatttttctgagattttgaagttcaaaagttttttgtttaaatcttttccccaacaaaggcagtagggcatagtggaaaagtacaagacttatattctaaaatatccgggctccaaagccaactttattgcttaccaaccaagtgacctgggtaagtgactcagactcattgagtcatcattctctcactttcacaaaatgaaatggaaataacaatgactatcccaatagggtccactcattaaaagaaatcaggaagtggcttcaaggccatgtggccaatgtaaattaaatatgaggatttctgttaaaatagacatttctaaatttcatgtgtccactttttggtgataactattttaatatttgtctttttatttttaatct

SEQ ID NO: 51 - DNA, 464 bp, Homo sapiens 217459
  misc_feature (207)..(207): n = g or t
ggtttccttgtaacacagtactttgccattttctttcaagttcgagaggttacatttttcatcctcgtgaaatctgtcgtgattccagttgcgtaggttatgacacgctgcaggagtcagaaggttgtgcagagtaaatgagctgtggtttctctcttacagcataggatatctgacgggattctgctcgccaaatgcctgacagtnttgggatttgttatcttcatgtttttcctcaattcgtttgtccctggcattcatcttgatcttggtgagtctaatttagctttggttcataggctttgtcacattctggatgggaaggtttcagagcctgttcccagacactgactttgcccacaggcagccgggctggtgggaggccagagagggctgagatggagggtgggcagcctgccctgggaagaagggcgcctttccttttggtttcctgggcaggaggg

SEQ ID NO: 52 - DNA, 659 bp, Homo sapiens 217460
  misc_feature (428)..(428): n = a or c
aaaattaagccaatctatagtgaaagaaaagagatgaatggtttactgggagtgtgggggttgacaagaggagctagaggagggtacaagaacataggcatgaataaactgtagggtcaatgggcatgttcattatcttgattacagtgttggtttcatgagtatacacataaccaaatagaaattatatgcattttacatatatgcggtttgtagtatgacaattattcttgataaagaaaaaggcaaccagaggttaaagaaatgaatcggtgtgttaacagtggaactatatctctatgtctatttacttattttcaggatggattgctattctgggtgccatctggttgctaattttagctgatattcatgattttgagataattctacacagagtggaatgggcaacccttctgttttttgcngcgctctttgttctgatggaggtaagattttagaacttttgccatatggcattttacctgatttttgtatttcatgttttatttggtgaatgaagaaagcctacatctattaatctttccttatattctctaagtggaaaacaatggaggttgtaattggactattttaagttaaccagctttaccttagccactgagagatttctgacagcactgcgtatttgttttttt

SEQ ID NO: 53 - DNA, 940 bp, Homo sapiens 217487
  misc_feature (422)..(422): n represents aatt sequence or none
ttgaatataatagattgagttattaactgtattttctttcactttattaccttctttctaatacaagcatatgttagmattaaagttctaggcatacttttcaaagctgggaagaccctttcagaatcttttcaatgggttttaattttcagttctatttaaaatggtgaatgacactaaactccatgatatttaaggatagtgtgaagatctttggcatgatttaaaggttgagtatgtgaagatataagtaagtgaactaccatgctttgtttacgtgtaaaggaaaataatgtttgatagtaaatgtccacttaaaatacatgaatgggcatttctaaaatgttaaaacataaacwcatttccattcatggatatttgtcaacagatttaaagaaaaccacagttattaattaaagaanaattaattatgtgtagttataaaccaatgaaattttgattaaccttttcaaattaatgttccagtttgaagaccaatcaaatatattatttagtcaacatatactatttagtctcaggttcaaggctacaacaaaaatcaccatctttgtcaaactttggagagggaaaatcttcactttcttaagcaacaatggatattgcctgtgtttgccactgtgtttccctgcctctcaattcgctgaaaaaggaactacctatccttacatttcacctactaatgtctcttctaacatcttagaggtccatggagaaggcatatggagaacatgttttatactgctctataaatagtattccaatcactgtgcttaatttaaatagcattmtcttatcatttatcagccttttatgtattttccaagtaaaatattaacatattayttcattggtcttcttttttatctggttctatatgaatgctattttttcccttctcttctaacatgaaatatatttt

SEQ ID NO: 54 - DNA, 751 bp, Homo sapiens 217489
  misc_feature (459)..(459): n = t or c
  misc_feature (14)..(17): nt. represent aatt insertion variant
  misc_feature (568)..(568): n represents nucleotide "a" insertion variant
attaattaaagaannnnaattaattatgtgtagttataaaccaatgaaattttgattaaccttttcaaattaatgttccagtttgaagaccaatcaaatatattatttagtcaacatatactatttagtctcaggttcaaggctacaacaaaaatcaccatctttgtcaaactttggagagggaaaatcttcactttcttaagcaacaatggatattgcctgtgtttgccactgtgtttccctgcctctcaattcgctgaaaaaggaactacctatccttacatttcacctactaatgtctcttctaacatcttagaggtccatggagaaggcatatggagaacatgttttatactgctctataaatagtattccaatcactgtgcttaatttaaatagcattmtcttatcatttatcagccttttatgtattttccaagtaaaatattaacatattanttcattggtcttcttttttatctggttctatatgaatgctattttttcccttctcttctaacatgaaatatattttctctttttgatcttgtgctatgaaacaatcttnccaaagaactgtataaggtggtcataagtgaatattttaattaaaattggtaaaaataaataataacagtaataatcatgcactatagaaaatggctaaactgagattctaaattctacaaacagaaacaagtttaagttatgtatccctgattggttactgggttttcctatattcaaaaat

SEQ ID NO: 55 - DNA, 2940 bp, Homo sapiens 554353
  misc_feature (1528)..(1528): n = g or a
gtatcatatataattgtatgtgctatactttttatatgactggcaacacaggtttgcttccatcagcatcaccatcaacatgtgagcaatgctatgacatcattaagtgatagggatttttcggctccattatgatctcatgggactaccatcatatacatggtctgttattgaccaaagcatcattatgcaggacatgactctacatactaattgttcatgagcaataacactgggaaaactgtctcaaagcataattctaattctgggtcagcaaaatcctcttcagaaataaacacataaacaaaaatcattgcttggtaatgttaatttaagatttgattatctgtttcaaattccttgttattcacaaaaagaatatacaatatactttgtattttcttctcctgtacttggtaacatgagctaaggatacaatgagataacagacaagtccactctgaggaatcctaagctgttccctacagtcaactcctatgcaggtgttcagactttgtaacaagaaaacagcatctcctatcaaatgatgattccacaatcatgaatatacaatcgtttttctatgtggcagttatttgagacatatggaaaggccataatttctctgtctagcaggcattcaatcccaagatggtaagcatcctcctattaaaaaagggctacataattctctcataccttaaaaatcctaaaatagtcaaaatacaaggcttcgtgttatttcactcaatttttgttactatatcctaaagaacagttttctgagttatagaagatagtcaaaatcagaaataattactttaaaatgttactttcctttatcaaattatttggtagcagatttttaaagctgaaatcaaagataaccaaagaaaattggcttgttttttctataacttaatgttaaactaaatttgggctgaagatgcctctgctccttaagtccttaccaaggaattgcaacttcatttactatataagctaacggaaagcctaacagtagaattaaacttttgtaaccaaatagctgagtctcagtcagtcacaggtggccaactaatcagatcatcttcaaataaggcaaatcccaagctgtaatcaatcaagccatttctgtacctcacttgcattttctgttcataaatgctccagcccatgtttttaagtgagctctctgaagctctctggttctgagggttgcctgatttgggaatagttctctgctgaattatattttgctaaattaaatttgcctcaagcttttattgtaacaatagtaaaagccagtatcataaaattttgtaccttaccagaaaaccagatgaattatccagcagacaccttagacgacatatgaagcacctctccattaaaggagagttttctggaggaatctggtctgggttataacagactactgtctgggggagaccagtggcttctgtagaaataaaggcaaaacaaaatttactttccattttgctgtaaaattaagcacttgaatagntaaaatttgyattagtttctaaactggagtctgtgttctgaatacaaaaaaatcattttcaaaagagctaatgacaagaaactaaaagtttattaaatatcacttttatcagatagaacttgcataattttttaaatttttattgagctatcactgtcaacaattttcatattttctaatgcatttttgttttcttaacactttaacaaatttccaaaaacattttttgcattgagaaaagcatttttatacttgcatatgctagcttacttttttctttggtgcattttaaacacaataatttacatgcactcaggtatcaaccttgtaccttccttccatctttcatgaaggtactacttatttttataaaatacattactgactatggcaatactctgttgcctgaaactcattaaatggctctcatttgccaaaatattccttagctcatcaggctctttgtgacctagctgtggcctatgattgcagactttacatctttccactacttccctatcatggagttctatgaccctacaggttcccagcctcctttcacagactcatatttaaaaactaccaacactattttttgtaccatcaattcttaccttcaattccttgtccagactctgtacactgagaaggatttaatgcccagtgtagctgacgctgaaattcagctcggtcttcggtatggataagttcatatacactctgatgtatgacatcagactaaagaaaaaagatacaaggaatacaacaaaaggactgattaaaaaatatggctaaattaattttaaagcctatttagattagtgggtgcttgctagtggtgatgaatacgaattgaatgattcctaaaattccctagtcacctaagatagaacctaaggtagaaaaagctaaagagactggcactacaacagataagccaaaagttacttgtcatcagttcccaacatgaatgctcttgctcaaataagtcacatccccattccttaaatgcaacatattaaaatctgtttatgttccatattcatttgttagtttttagattcttatctcttccatgcagcttttcctaaccaccccaggcctctttgacttctctaagcttaatggtattctttatgtatttccttcactgttctctaaaattttcttcatataaaattttcactccaagtagactccacaagagcaagggattgtgcctttaccatattaaacccactttccttctcttgcctctcaccatttactacggtgctgagtccttagtgcttaaaccagagttttcctttttttttaactgcaagttatgataaaaaatacatttccatctgtcacaggtgtgtgcacagacataaacacatggaaaagtttcacaaaacacttaccattat

SEQ ID NO: 56 - DNA, 2170 bp, Homo sapiens 554363
  misc_feature (1093)..(1093): n = t or c
gacatctcagacatggtcgtgggagaggtgtgcccgggtcagggggcaccaggagaggccaaggactctgtacctcctatccacgtcagagatttcgattttaggtttctcctctgggcaaggagagagggtggaggctggcacttggggagggacttggtgaggtcagtggtaaggacaggcaggccctgggtctacctggagatggctggggcctgagacttgtccaggtgaacgcagagcacaggagggattgagaccccgttctgtctggtgtaggtgctgaatgctgtccccgtcctcctgcatatcccagcgctggctggcaaggtcctacgcttccaaaaggctttcctgacccagctggatgagctgctaactgagcacaggatgacctgggacccagcccagcccccccgagacctgactgaggccttcctggcagagatggagaaggtgagagtggctgccacggtggggggcaagggtggtgggttgagcgtcccaggaggaatgaggggaggctgggcaaaaggttggaccagtgcatcacccggcgagccgcatctgggctgacaggtgcagaattggaggtcatttgggggctaccccgttctgtcccgagtatgctctcggccctgctcaggccaaggggaaccctgagagcagcttcaatgatgagaacctgcgcatagtggtggctgacctgttctctgccgggatggtgaccacctcgaccacgctggcctggggcctcctgctcatgatcctacatccggatgtgcagcgtgagcccatctgggaaacagtgcaggggccgagggaggaagggtacaggcgggggcccatgaactttgctgggacacccggggctccaagcacaggcttgaccaggatcctgtaagcctgacctcctccaacataggaggcaagaaggagtgtcagggccggaccccctgggtgctgacccattgtggggacgcrtgtctgtccaggccgtgtccaacaggagatcgacracgtgatagggcaggtgyggygaccagagatgggtgaccwggctcrcatgccctrcaycactgccgtgattcangaggtgcagcgctttggggacatcgtccccctgggtgtgacccatatgacatcccgtgacatcgaagtacagggcttccgcatccctaaggtaggcctggcrccctcctcaccccagctcagcaccagcmcctggtgatagccccagcatggcyactgccaggtgggcccastctaggaamcctggccaccyagtcctcaatgccaccacactgactgtccccacttgggtggggggtccagagtataggcagggctggcctgtccatccagagcccccgtctagtggggagacaaaccaggacctgccagaatgttggaggacccaacgcctgcagggagagggggcagtgtgggtgcctctgagaggtgtgactgcgccctgctgtggggtcggagagggtactgtggagcttctcgggcgcaggactagttgacagagtccagctgtgtgccaggcagtgtgtgtcccccgtgtgtttggtggcaggggtcccagcatcctagagtccagtccccactctcaccctgcatctcctgcccagggaacgacactcatcaccaacctgtcatcggtgctgaaggatgaggccgtctgggagaagcccttccgcttccaccccgaacacttcctggatgcccagggccactttgtgaagccggaggccttcctgcctttctcagcaggtgcctgtggggagcccggctccctgtccccttccgtggagtcttgcaggggtatcacccaggagccaggctcactgacgcccctcccctccccacaggccgccgtgcatgcctcggggagcccctggcccgcatggagctcttcctcttcttcacctccctgctgcagcacttcagcttctcggtgcccactggacagccccggcccagccaccatggtgtctttgctttcctggtgagcccatccccctatgagctttgtgctgtgccccgctagaatggggtacctagtccccagcctgctccctagccagaggctctaatgtacaataaagcaatgtggtagttccaactcgggtcccctgctcacgccctcgttgggatcatcctc

SEQ ID NO: 57 - DNA, 2170 bp, Homo sapiens 554368
  misc_feature (1274)..(1274): n = a or c
gacatctcagacatggtcgtgggagaggtgtgcccgggtcagggggcaccaggagaggccaaggactctgtacctcctatccacgtcagagatttcgattttaggtttctcctctgggcaaggagagagggtggaggctggcacttggggagggacttggtgaggtcagtggtaaggacaggcaggccctgggtctacctggagatggctggggcctgagacttgtccaggtgaacgcagagcacaggagggattgagaccccgttctgtctggtgtaggtgctgaatgctgtccccgtcctcctgcatatcccagcgctggctggcaaggtcctacgcttccaaaaggctttcctgacccagctggatgagctgctaactgagcacaggatgacctgggacccagcccagcccccccgagacctgactgaggccttcctggcagagatggagaaggtgagagtggctgccacggtggggggcaagggtggtgggttgagcgtcccaggaggaatgaggggaggctgggcaaaaggttggaccagtgcatcacccggcgagccgcatctgggctgacaggtgcagaattggaggtcatttgggggctaccccgttctgtcccgagtatgctctcggccctgctcaggccaaggggaaccctgagagcagcttcaatgatgagaacctgcgcatagtggtggctgacctgttctctgccgggatggtgaccacctcgaccacgctggcctggggcctcctgctcatgatcctacatccggatgtgcagcgtgagcccatctgggaaacagtgcaggggccgagggaggaagggtacaggcgggggcccatgaactttgctgggacacccggggctccaagcacaggcttgaccaggatcctgtaagcctgacctcctccaacataggaggcaagaaggagtgtcagggccggaccccctgggtgctgacccattgtggggacgcrtgtctgtccaggccgtgtccaacaggagatcgacracgtgatagggcaggtgyggygaccagagatgggtgaccwggctcrcatgccctrcaycactgccgtgattcaygaggtgcagcgctttggggacatcgtccccctgggtgtgacccatatgacatcccgtgacatcgaagtacagggcttccgcatccctaaggtaggcctggcrccctcctcaccccagctcagcaccagcmcctggtgatagccccagcatggcyactgccaggtgggcccastctaggaancctggccaccyagtcctcaatgccaccacactgactgtccccacttgggtggggggtccagagtataggcagggctggcctgtccatccagagcccccgtctagtggggagacaaaccaggacctgccagaatgttggaggacccaacgcctgcagggagagggggcagtgtgggtgcctctgagaggtgtgactgcgccctgctgtggggtcggagagggtactgtggagcttctcgggcgcaggactagttgacagagtccagctgtgtgccaggcagtgtgtgtcccccgtgtgtttggtggcaggggtcccagcatcctagagtccagtccccactctcaccctgcatctcctgcccagggaacgacactcatcaccaacctgtcatcggtgctgaaggatgaggccgtctgggagaagcccttccgcttccaccccgaacacttcctggatgcccagggccactttgtgaagccggaggccttcctgcctttctcagcaggtgcctgtggggagcccggctccctgtccccttccgtggagtcttgcaggggtatcacccaggagccaggctcactgacgcccctcccctccccacaggccgccgtgcatgcctcggggagcccctggcccgcatggagctcttcctcttcttcacctccctgctgcagcacttcagcttctcggtgcccactggacagccccggcccagccaccatggtgtctttgctttcctggtgagcccatccccctatgagctttgtgctgtgccccgctagaatggggtacctagtccccagcctgctccctagccagaggctctaatgtacaataaagcaatgtggtagttccaactcgggtcccctgctcacgccctcgttgggatcatcctc

SEQ ID NO: 58 - DNA, 2170 bp, Homo sapiens 554370
  misc_feature (1024)..(1024): n = g or a
gggaggcagggggtccacttgatgtcgagactgcagtgagccatgatcctgccactgcactccggcctgggcaacagagtgagaccctgtctaaagaaaaaaaaaataaagcaacatatcctgaacaaaggatcctccataacgttcccaccagatttctaatcagaaacatggaggccagaaagcagtggaggaggacgaccctcaggcagcccgggaggatgttgtcacaggctggggcaagggccttccggctaccaactgggagctctgggaacagccctgttgcaaacaagaagccatagcccggccagagcccaggaatgtgggctgggctgggagcagcctctggacaggagtggtcccatccaggaaacctccggcatggctgggaagtggggtacttggtgccgggtctgtatgtgtgtgtgactggtgtgtgtgagagagaatgtgtgccctaagtgtcagtgtgagtctgtgtatgtgtgaatattgtctttgtgtgggtgattttctgcgtgtgtaatcgtgtccctgcaagtgtgaacaagtggacaagtgtctgggagtggacaagagatctgtgcaccatcaggtgtgtgcatagcgtctgtgcatgtcaagagtgcaaggtgaagtgaagggaccaggcccatgatgccactcatcatcaggagctctaaggccccaggtaagtgccagtgacagataagggtgctgaaggtcactctggagtgggcaggtgggggtagggaaagggcaaggccatgttctggaggaggggttgtgactacattagggtgtatgagcctagctgggaggtggatggccgggtccactgaaaccctggttatcccagaaggctttgcaggcttcaggagcttggagtggggagagggggtgacttctccgaccaggcccctccaccggcctaccctgggtaagggcctggagcaggaagcaggggcaagaacctctggagcagcccatacccgccctggcctgactctgccactggcancacagtcaacacagcaggttcactcacagcagagggcaaaggccatcatcagctccctttataagggaagggtcacgcgctcggtgtgctgagagtgtcctgcctggtcctctgtgcctggtggggtgggggtgccaggtgtgtccagaggagcccatttggtagtgaggcaggtatggggctagaagcactggtgcccctggccgtgatagtggccatcttcctgctcctggtggacctgatgcaccggcgccaacgctgggctgcacgctacccaccaggccccctgccactgcccgggctgggcaacctgctgcatgtggacttccagaacacaccatactgcttcgaccaggtgagggaggaggtcctggagggcggcagaggtgctgaggctcccctaccagaagcaaacatggatggtgggtgaaaccacaggctggaccagaagccaggctgagaaggggaagcaggtttgggggacgtcctggagaagggcatttatacatggcatgaaggactggattttccaaaggccaaggaagagtagggcaagggcctggaggtggagctggacttggcagtgggcatgcaagcccattgggcaacatatgttatggagtacaaagtcccttctgctgacaccagaaggaaaggccttgggaatggaagatgagttagtcctgagtgccgtttaaatcacgaaatcgaggatgaagggggtgcagtgacccggttcaaaccttttgcactgtgggtcctcgggcctcactgcctcaccggcatggaccatcatctgggaatgggatgctaactggggcctctcggcaattttggtgactcttgcaaggtcatacctgggtgacgcatccaaactgagttcctccatcacagaaggtgtgacccccacccccgccccacgatcaggaggctgggtctcctccttccacctgctcactcctggtagccccgggggtcgtccaaggttcaaataggactaggacctgtagtctggggtgatcctggcttgacaagaggccctgaccctccctctgcagttgcggcgccgcttcggggacgtgttcagcctgcagctggcctggacgccggtggtcgtgctcaatgggctggcggccgtgcgcgagg

SEQ ID NO: 59 - DNA, 2240 bp, Homo sapiens 554371
  misc_feature (1159)..(1159): n = t or c
aacgttcccaccagatttctaatcagaaacatggaggccagaaagcagtggaggaggacgaccctcaggcagcccgggaggatgttgtcacaggctggggcaagggccttccggctaccaactgggagctctgggaacagccctgttgcaaacaagaagccatagcccggccagagcccaggaatgtgggctgggctgggagcagcctctggacaggagtggtcccatccaggaaacctccggcatggctgggaagtggggtacttggtgccgggtctgtatgtgtgtgtgactggtgtgtgtgagagagaatgtgtgccctaagtgtcagtgtgagtctgtgtatgtgtgaatattgtctttgtgtgggtgattttctgcgtgtgtaatcgtgtccctgcaagtgtgaacaagtggacaagtgtctgggagtggacaagagatctgtgcaccatcaggtgtgtgcatagcgtctgtgcatgtcaagagtgcaaggtgaagtgaagggaccaggcccatgatgccactcatcatcaggagctctaaggccccaggtaagtgccagtgacagataagggtgctgaaggtcactctggagtgggcaggtgggggtagggaaagggcaaggccatgttctggaggaggggttgtgactacattagggtgtatgagcctagctgggaggtggatggccgggtccactgaaaccctggttatcccagaaggctttgcaggcttcaggagcttggagtggggagagggggtgacttctccgaccaggcccctccaccggcctaccctgggtaagggcctggagcaggaagcaggggcaagaacctctggagcagcccatacccgccctggcctgactctgccactggcagcacagtcaacacagcaggttcactcacagcagagggcaaaggccatcatcagctccctttataagggaagggtcacgcgctcggtgtgctgagagtgtcctgcctggtcctctgtgcctggtggggtgggggtgccaggtgtgtccagaggagcccatttggtagtgaggcaggtatggggctagaagcactggtgcccctggccgtgatagtggccatcttcctgctcctggtggacctgatgcaccggcgccaacgctgggctgcacgctacncaccaggccccctgccactgcccgggctgggcaacctgctgcatgtggacttccagaacacaccatactgcttcgaccaggtgagggaggaggtcctggagggcggcagaggtgctgaggctcccctaccagaagcaaacatggatggtgggtgaaaccacaggctggaccagaagccaggctgagaaggggaagcaggtttgggggacgtcctggagaagggcatttatacatggcatgaaggactggattttccaaaggccaaggaagagtagggcaagggcctggaggtggagctggacttggcagtgggcatgcaagcccattgggcaacatatgttatggagtacaaagtcccttctgctgacaccagaaggaaaggccttgggaatggaagatgagttagtcctgagtgccgtttaaatcacgaaatcgaggatgaagggggtgcagtgacccggttcaaaccttttgcactgtgggtcctcgggcctcactgcctcaccggcatggaccatcatctgggaatgggatgctaactggggcctctcggcaattttggtgactcttgcaaggtcatacctgggtgacgcatccaaactgagttcctccatcacagaaggtgtgacccccacccccgccccacgatcaggaggctgggtctcctccttccacctgctcactcctggtagccccgggggtcgtccaaggttcaaataggactaggacctgtagtctggggtgatcctggcttgacaagaggccctgaccctccctctgcagttgcggcgccgcttcggggacgtgttcagcctgcagctggcctggacgccggtggtcgtgctcaatgggctggcggccgtgcgcgaggcgctggtgacccacggcgaggacaccgccgaccgcccgcctgtgcccatcacccagatcctgggtttcgggccgcgttcccaaggcaagcagcggtggggacagagacagatttccgtgggacccgggtgggtgatgaccgtagtccgagctgggcagagagggcgcggggtcgtggacatgaaacaggccagcgagtggggacagcggg

SEQ ID NO: 60 - DNA, 1050 bp, Homo sapiens 615921
  misc_feature (484)..(484): n = a or c
tttgcatagatgggtttgggaaaggacattccaggagaccccactgtaagaagggcctggaggaggaggggacatctcagacatggtcgtgggagaggtgtgcccgggtcagggggcaccaggagaggccaaggactctgtacctcctatccacgtcagagatttcgattttaggtttctcctctgggcaaggagagagggtggaggctggcacttggggagggacttggtgaggtcagtggtaaggacaggcaggccctgggtctacctggagatggctggggcctgagacttgtccaggtgaacgcagagcacaggagggattgagaccccgttctgtctggtgtaggtgctgaatgctgtccccgtcctcctgcayatcccagcgctggctggcaaggtcctacgcttccaaaaggctttcctgacccagctggatgagctgctaactgagcacaggatgacctgggacccagcccagcmnccccgagacctgactgaggccttcctggcagagatggagaaggtgagagtggctgccacggtggggggcaagggtggtgggttgarcgtcccaggaggaatgaggggaggctgggcaaaaggttggaccagtgcatcacccggcgagccgcatctgggctgacaggtgcaraattggaggtcayttgggggctaccccgttctgtcccgagtatgctctcggccctgctcaggccaaggggaaccctgagagcagcttcaatgatgagaacctgygcatagtggtggctgacctgttctctgccgggatggtgaccacctcgaccacgctggcctggggcctcctgytcatgatcctacatccggatgtgcagcgtgagcccatctgggaaacagtscasgggccgagggaggaagggtacaggcgggggcccatgaactttgctgggacacccggggctccaagcacaggcttgaccaggatcctgtaagcctgacctcctccaacataggaggcaagaaggagtgtcagggccggaccccctgggtgctgacccattgtgggga

SEQ ID NO: 61 - DNA, 1820 bp, Homo sapiens 615925
  misc_feature (619)..(619): n = c or t
tacctcctatccacgtcagagatttcgattttaggtttctcctctgggcaaggagagagggtggaggctggcacttggggagggacttggtgaggtcagtggtaaggacaggcaggccctgggtctacctggagatggctggggcctgagacttgtccaggtgaacgcagagcacaggagggattgagaccccgttctgtctggtgtaggtgctgaatgctgtccccgtcctcctgcayatcccagcgctggctggcaaggtcctacgcttccaaaaggctttcctgacccagctggatgagctgctaactgagcacaggatgacctgggacccagcccagcmmccccgagacctgactgaggccttcctggcagagatggagaaggtgagagtggctgccacggtggggggcaagggtggtgggttgarcgtcccaggaggaatgaggggaggctgggcaaaaggttggaccagtgcatcacccggcgagccgcatctgggctgacaggtgcaraattggaggtcayttgggggctaccccgttctgtcccgagtatgctctcggccctgctcaggccaaggggaaccctgagagcagcttcaatgatgagaacctgngcatagtggtggctgacctgttctctgccgggatggtgaccacctcgaccacgctggcctggggcctcctgytcatgatcctacatccggatgtgcagcgtgagcccatctgggaaacagtscasgggccgagggaggaagggtacaggcgggggcccatgaactttgctgggacacccggggctccaagcacaggcttgaccaggatcctgtaagcctgacctcctccaacataggaggcaagaaggagtgtcagggccggaccccctgggtgctgacccattgtggggacgcatgtctgtccaggccgtgtccaacaggagatcgacgacgtgatagggcaggtgcggcgaccagagatgggtgaccaggctcacatgccctacaccactgccgtgattcatgaggtgcagcgctttggggacatcgtccccctgggtgtgacccatatgacatcccgtgacatcgaagtacagggcttccgcatccctaaggtaggcctggcgccctcctcaccccagctcagcaccagcacctggtgatagccccagcatggctactgccaggtgggcccactctaggaaccctggccacctagtcctcaatgccaccacactgactgtccccacttgggtggggggtccagagtataggcagggctggcctgtccatccagagcccccgtctagtggggagacaaaccaggacctgccagaatgttggaggacccaacgcctgcagggagagggggcagtgtgggtgcctctgagaggtgtgactgcgccctgctgtggggtcggagagggtactgtggagcttctcgggcgcaggactagttgacagagtccagctgtgtgccaggcagtgtgtgtcccccgtgtgtttggtggcaggggtcccagcatcctagagtccagtccccactctcaccctgcatctcctgcccagggaacgacactcatcaccaacctgtcatcggtgctgaaggatgaggccgtctgggagaagcccttccgcttccaccccgaacacttcctggatgcccagggccactttgtgaagccggaggccttcctgcctttctcagcaggtgcctgtggggagcccggctccctgtccccttccgtggagtcttgcaggggtatcacccaggagccaggctcactgacgcccctcccctccccacaggccgccgtgcatg

SEQ ID NO: 62 - DNA, 1050 bp, Homo sapiens 615926
  misc_feature (551)..(551): n = t or c
ggggcctgagacttgtccaggtgaacgcagagcacaggagggattgagaccccgttctgtctggtgtaggtgctgaatgctgtccccgtcctcctgcayatcccagcgctggctggcaaggtcctacgcttccaaaaggctttcctgacccagctggatgagctgctaactgagcacaggatgacctgggacccagcccagcmmccccgagacctgactgaggccttcctggcagagatggagaaggtgagagtggctgccacggtggggggcaagggtggtgggttgarcgtcccaggaggaatgaggggaggctgggcaaaaggttggaccagtgcatcacccggcgagccgcatctgggctgacaggtgcaraattggaggtcayttgggggctaccccgttctgtcccgagtatgctctcggccctgctcaggccaaggggaaccctgagagcagcttcaatgatgagaacctgygcatagtggtggctgacctgttctctgccgggatggtgaccacctcgaccacgctggcctggggcctcctgntcatgatcctacatccggatgtgcagcgtgagcccatctgggaaacagtscasgggccgagggaggaagggtacaggcgggggcccatgaactttgctgggacacccggggctccaagcacaggcttgaccaggatcctgtaagcctgacctcctccaacataggaggcaagaaggagtgtcagggccggaccccctgggtgctgacccattgtggggacgcatgtctgtccaggccgtgtccaacaggagatcgacgacgtgatagggcaggtgcggcgaccagagatgggtgaccaggctcacatgccctacaccactgccgtgattcatgaggtgcagcgctttggggacatcgtccccctgggtgtgacccatatgacatcccgtgacatcgaagtacagggcttccgcatccctaaggtaggcctggcgccctcctcaccccagctcagcaccagcacctggtgatagccccagcatggctactgccaggtggg

SEQ ID NO: 63 - DNA, 2170 bp, Homo sapiens 664784
  misc_feature (1177)..(1177): n = g or a
cagcagagggcaaaggccatcatcagctccctttataagggaagggtcacgcgctcggtgtgctgagagtgtcctgcctggtcctctgtgcctggtggggtgggggtgccaggtgtgtccagaggagcccatttggtagtgaggcaggtatggggctagaagcactggtgcccctggccgtgatagtggccatcttcctgctcctggtggacctgatgcaccggcgccaacgctgggctgcacgctacccaccaggccccctgccactgcccgggctgggcaacctgctgcatgtggacttccagaacacaccatactgcttcgaccaggtgagggaggaggtcctggagggcggcagaggtgctgaggctcccctaccagaagcaaacatggatggtgggtgaaaccacaggctggaccagaagccaggctgagaaggggaagcaggtttgggggacgtcctggagaagggcatttatacatggcatgaaggactggattttccaaaggccaaggaagagtagggcaagggcctggaggtggagctggacttggcagtgggcatgcaagcccattgggcaacatatgttatggagtacaaagtcccttctgctgacaccagaaggaaaggccttgggaatggaagatgagttagtcctgagtgccgtttaaatcacgaaatcgaggatgaagggggtgcagtgacccggttcaaaccttttgcactgtgggtcctcgggcctcactgcctcaccggcatggaccatcatctgggaatgggatgctaactggggcctctcggcaattttggtgactcttgcaaggtcatacctgggtgacgcatccaaactgagttcctccatcacagaaggtgtgacccccacccccgccccacgatcaggaggctgggtctcctccttccacctgctcactcctggtagccccgggggtcgtccaaggttcaaataggactaggacctgtagtctggggtgatcctggcttgacaagaggccctgaccctccctctrcagytgcggcgccgcttyggggacgtgttcagcctgcagctggcctggacgccggtggtcgtgctcaatgggctggcggccgtgcgygaggcgctggtgacccacggmgaggacaccgccgaccgcccgcctgygcccatcacccagntcctgggyttcgggccgcgytcccaaggcaagcrgcggtggggacagagacagrtttccgtgggaccygggtggryrrtgaccgtagtccgagctgggcagagagggcgyggggtcgtggacatgaaacaggccagcgagtggggacagcgggccaagaaaccacctgcactagggaggtgtgagcatggggacgagggcggggcttgtgacgagtgggcggggccactgccgagacctggcaggagcccaatgggtgagcgtggcgcatttcccagctggaatccggtgtcgaagtgggggcggggaccgcacctgtgctgtaagctcagtgtgggtggcgcggggcccgcggggtcttccctgagtgcaaaggcggtcagggtgggcagagacgaggtggggcaaagcctgccccagccaagggagcaaggtggatgcacaaagagtgggccctgtgaccagctggacagagccagggactgcgggagaccagggggagcatagggttggagtgggtggtggatggtggggctaatgccttcatggccacgcgcacgtgcccgtcccacccccaggggtgttcctggcgcgctatgggcccgcgtggcgcgagcagaggcgcttctccgtgtccaccttgcgcaacttgggcctgggcaagaagtcgctggagcagtgggtgaccgaggaggccgcctgcctttgtgccgccttcgccaaccactccggtgggtgatgggcagaagggcacaaagcgggaactgggaaggcgggggacggggaaggcgaccccttacccgcatctcccacccccaggacgcccctttcgccccaacggtctcttggacaaagccgtgagcaacgtgatcgcctccctcacctgcgggcgccgcttcgagtacgacgaccctcgcttcctcaggctgctggacctagctcaggagggactgaaggaggagtcgggctttctgcgcgaggtgcggagcgagag

SEQ ID NO: 64 - DNA, 2170 bp, Homo sapiens 664785
  misc_feature (1185)..(1185): n = t or c
cagcagagggcaaaggccatcatcagctccctttataagggaagggtcacgcgctcggtgtgctgagagtgtcctgcctggtcctctgtgcctggtggggtgggggtgccaggtgtgtccagaggagcccatttggtagtgaggcaggtatggggctagaagcactggtgcccctggccgtgatagtggccatcttcctgctcctggtggacctgatgcaccggcgccaacgctgggctgcacgctacccaccaggccccctgccactgcccgggctgggcaacctgctgcatgtggacttccagaacacaccatactgcttcgaccaggtgagggaggaggtcctggagggcggcagaggtgctgaggctcccctaccagaagcaaacatggatggtgggtgaaaccacaggctggaccagaagccaggctgagaaggggaagcaggtttgggggacgtcctggagaagggcatttatacatggcatgaaggactggattttccaaaggccaaggaagagtagggcaagggcctggaggtggagctggacttggcagtgggcatgcaagcccattgggcaacatatgttatggagtacaaagtcccttctgctgacaccagaaggaaaggccttgggaatggaagatgagttagtcctgagtgccgtttaaatcacgaaatcgaggatgaagggggtgcagtgacccggttcaaaccttttgcactgtgggtcctcgggcctcactgcctcaccggcatggaccatcatctgggaatgggatgctaactggggcctctcggcaattttggtgactcttgcaaggtcatacctgggtgacgcatccaaactgagttcctccatcacagaaggtgtgacccccacccccgccccacgatcaggaggctgggtctcctccttccacctgctcactcctggtagccccgggggtcgtccaaggttcaaataggactaggacctgtagtctggggtgatcctggcttgacaagaggccctgaccctccctctrcagytgcggcgccgcttyggggacgtgttcagcctgcagctggcctggacgccggtggtcgtgctcaatgggctggcggccgtgcgygaggcgctggtgacccacggmgaggacaccgccgaccgcccgcctgygcccatcacccagrtcctgggnttcgggccgcgytcccaaggcaagcrgcggtggggacagagacagrtttccgtgggaccygggtggryrrtgaccgtagtccgagctgggcagagagggcgyggggtcgtggacatgaaacaggccagcgagtggggacagcgggccaagaaaccacctgcactagggaggtgtgagcatggggacgagggcggggcttgtgacgagtgggcggggccactgccgagacctggcaggagcccaatgggtgagcgtggcgcatttcccagctggaatccggtgtcgaagtgggggcggggaccgcacctgtgctgtaagctcagtgtgggtggcgcggggcccgcggggtcttccctgagtgcaaaggcggtcagggtgggcagagacgaggtggggcaaagcctgccccagccaagggagcaaggtggatgcacaaagagtgggccctgtgaccagctggacagagccagggactgcgggagaccagggggagcatagggttggagtgggtggtggatggtggggctaatgccttcatggccacgcgcacgtgcccgtcccacccccaggggtgttcctggcgcgctatgggcccgcgtggcgcgagcagaggcgcttctccgtgtccaccttgcgcaacttgggcctgggcaagaagtcgctggagcagtgggtgaccgaggaggccgcctgcctttgtgccgccttcgccaaccactccggtgggtgatgggcagaagggcacaaagcgggaactgggaaggcgggggacggggaaggcgaccccttacccgcatctcccacccccaggacgcccctttcgccccaacggtctcttggacaaagccgtgagcaacgtgatcgcctccctcacctgcgggcgccgcttcgagtacgacgaccctcgcttcctcaggctgctggacctagctcaggagggactgaaggaggagtcgggctttctgcgcgaggtgcggagcgagag

SEQ ID NO: 65 - DNA, 2380 bp, Homo sapiens 664793
  misc_feature (1421)..(1421): n = a or c
agccaatccagacaaacatttatatttaaacatttatatttaaacaaaaggcctctctgaacaaatagcctgcggagataaatacagtgatttgttttcctgatagaactatttagcatgtttaacacattattctgtagtttgggaataagagtgtttcttcccttgaagaaaacaggtccccttctgaagaataatgctgattaccccccaaaatcaaaatagaccagcaccaaatgaagtattaatttacaaacatgaacttagaacttagctcttacttcttgaagttctacatcccagacttaataaattaactacaaaatcaggagtttcatcagctacagtataatttaaaaatccattttcaactggcaggagtgagggagaaggtcaattgcactgatcaccatgaacttcaagaatttcatcaaaacttttttcccagcttatatttgccttcagaggtgagctgtagattaccatctctgatgctttaacatacaatattcttgttgaaatctcttcaaagagcacagcatgtaaagcactaaactgtgttcagatctgaggagtctgcatggaaagaacctgagacctctctgaaagagccaaaaaccaagtggctgtctcagtgatcacatctattcatcctccacaagacaatgcattgagcttttttaattcacagattttatgttagtcctttagaacccaatgcccatgttccagttcagaactgtcgggctattcaggctgtcttcttggtgcaagctccttggaggtcttgtaaattgatcttcgacctatggtagaaaatgacaaagtagcaatatataaatatcaggagtgtagaattttaacttggaactacagtagatgaatagtaagtttttacactgcatattttttgaagtatagggggaacatgttaaatatatctttgagtcttacctgttgtgaatcatgtgacttttgacaagatgtcctgctgccaatgctgccataagtgacaattccccagccattacggtcccacacacaattcgggcaagctgccgggcattttccccaggattatctttgcatgctccttgaacacctagcatctgtagccagggagagacacaacaagattcacccttaaaatcatgaccaatttcttactaaatcaactaaaaacagggcaactgtaatggcatcagaatagaactagactccactggaagcactaactttccaagacttgacagccacacctgacagtgcataataccatagctaacataatattcacagcctgactggcagtacccttaactcagtagatgaacattcatttgctctcttcatctactttcttatctaagcataagcttaaacatgcttatttggacacaatggattaggctgatatgacnaaagagtttggaaaagaccaattaaaatagaggtgagtgatacatartctcagatagaaagagaaacccagagagtcagaactaggcttgtggactctatgcctgatacatcatacctgcaaacaggcttgctgaggtagtaggttggtcccaccacccaccgttcctatctctatagatggcatggtgcagctgatatataaatcttcatttgtgggaccacttgcttccattaaagtaatacagtttgaactaccaacattctgtgctgcatcctgsaaacaagaaaagaaaaaatatacaatatacttctttcacttagaaagacgtmacacaagagaagtggaggctggagagctcacctgtccacaggcaatgtagatggcggtgacaatgtttgctgcatgggcgttgtagcctcctatgctcccagscatggcagagcccactaaattcttgttaatgttgacctcaatcatagcctctgtggtagtctttaatacctacaaaacagagctgtgtacatttagatgttcctccagaaggttcaggggaatgttacccaaatctatctttctgaacctccagaaaacaaagtttagatgtggccccatttaagccctgtcctccattaaaaaataaaaaaaattaaaaaaaatcagtaaagtttgttcctatggatgatacacacagacagatgggcaaggtacaacagtcatctttgatggaaaacactgtcccatatatttaactttatttaaaatgttaatactcctttcccccatttttaaatacaattaaagattacaaaataaaaaagataaattatccatccagtcactcacttctctgacaaccttggctggaatgacagcttcacaaacaacagattttcctcttccctctatccaatttatagcagcaggtttcttgtcagtacaatagttaccactaacggc

SEQ ID NO: 66 - DNA, 2730 bp, Homo sapiens 664802
  misc_feature (1466)..(1466): n = t or c
ctgggactagagtctgcacatttaactatgggtggtgttgtgttttgtgcttagatggtccctatcattgcccagtatggagatgtgttggtgagaaatctgaggcgggaagcagagacaggcaagcctgtcaccttgaaagagtaagtagaagcgcagccatggggttctgagctgtcatgaacccctccagctgcctgccatggagctgatattcctgctgttgggttattccagtgaccagacaaaaggagggctgtggtaatgcaacttcaatgggtctcccaagatggggcagctccgatgaggaggtggggcagctggaggaaaaggatcttctcccctgtgcacaggggccagggtttacatatccattaaattgtcaccttggatattctagaagactaaatatatcctttagggggaaaaagtgtgattgtaccaaagttttaagcatggagtgtatgggatggtggaaggggaaggcacttggtatctgttggttggcagtgagtaggttgggagagttataatggagaacttagaataactttgatcatttcatgtttttttctgaggatatcagtagaatactaaatattaaaattcctaccatttctttttcctccagtctcaaagagagagggtggtaaaaacactataggtagggcaagcctattatttgctatctacacttatgcagtaaaaacaggtgtaatctgagtttgtcctgggcagaccagggatatgtggtcactcactatagaaatttccaaatcaaattttgagagatttttttttaaccaggacattattggtcattatattttacaaaaataattctgctgtcagggcaacctcagctcaccacagctggggatagtggaattttccaaagcttgagcagggagtatagagaataaggatgatatttctaggagctcagaacagggtactgttgctttgtaaagtgctgaagaggaatcggctctgggcatagagtctgcagtcaggcaatatcacctgtcttgagccccttaggaagagttaattattctactcttgttctgctgaagcacagtgcttacccatcttgtatcatccacaatcaatacatgctactgtagttgtctgatagtgggtctctgtcttcctatgatgggctccttgatctcagaggtaggtctaattcagttcagtgtctccatcacacccagcgtagggccagctgcatcactggcacctgataacaccttctgatggagtgtgatagaaggtgatctagtagatctgaaagtctgtggctgtttgtctgtcttgactggacatgtgggtttcctgttgcatgcatagaggaaggakggtaaaaaggtgctgattttaattttccacatctttctccactcagcgtctttggggcctacagcatggatgtgatcactagcacatcatttggagtgaacatngactctctcaacaatccacaagacccctttgtggaaaacaccaagaagcttttaagatttgattttttggatccattctttctctcaataagtatgtggactactatttcctttaatttatcttkctctcttaaaaataactgctttattgagatataaatcaccatgtaattcakccacttwaaatatacagttcagtgatttgtagtacatttgaagatatgtgtgaccatcatcattttaaactttaaaactttttttgtcaatctagagacctcatacatttttagctatcagccccctgtcacaaaccctgtcatcatatgcaaccactaatcaactttctgcttctatggatttgcctattctggacacttcatagaaatgatattaattcatcagggttttttattctctagttcatgaatttgtactttagtctgtatcattttctttcttctgctggcttcaggcttagtttgcccttcttcgtttactatgttgtggcatgaacatagattactgatttgtgatttttttgttcctctaaatttagacattacagctgtaactttccctctgagcacttcctttgctaaatcccatgagattgtggcctatcacatcttagttttgttcacctcaaaacagtttctatttgccctttgggtttctactttgactcattgggtacttaaatgtttattatttaacttccacatatgtgtgagtttctcaattttctttcccttattgattttatctttattccatgataggtgacagagatatgctgtgttatttctatcttgactacctactatttcttgaacagcaagattaattttgagcttcagattatgatttgggttattctaggagactgtagtccaatagataaaggcaaagagattagggcattgaattttgttccttttatccttcaaaagatgcacaaggggctgctgatctcactgctgtagcggtgctccttatgcatagacctgcccttgctcagccactggcctgaaagaggggcaaaagtcatagaaggaatggcttccagttgagaaccttgatgtcttttactcttctggttggtagagaaaactagaattgctccaggtaaattttgcacattcacaatgaatttctttttctgtttttgttttgtttttcctacagcagtctttccattcctcatcccaattcttgaagtattaaatatctgtgtgtttccaagagaagttacaaattttttaag

SEQ ID NO: 67 - DNA, 2590 bp, Homo sapiens 660843
  misc_feature (1311)..(1311): n = g or t
tctcccaagatggggcagctccgatgaggaggtggggcagctggaggaaaaggatcttctcccctgtgcacaggggccagggtttacatatccattaaattgtcaccttggatattctagaagactaaatatatcctttagggggaaaaagtgtgattgtaccaaagttttaagcatggagtgtatgggatggtggaaggggaaggcacttggtatctgttggttggcagtgagtaggttgggagagttataatggagaacttagaataactttgatcatttcatgtttttttctgaggatatcagtagaatactaaatattaaaattcctaccatttctttttcctccagtctcaaagagagagggtggtaaaaacactataggtagggcaagcctattatttgctatctacacttatgcagtaaaaacaggtgtaatctgagtttgtcctgggcagaccagggatatgtggtcactcactatagaaatttccaaatcaaattttgagagatttttttttaaccaggacattattggtcattatattttacaaaaataattctgctgtcagggcaacctcagctcaccacagctggggatagtggaattttccaaagcttgagcagggagtatagagaataaggatgatatttctaggagctcagaacagggtactgttgctttgtaaagtgctgaagaggaatcggctctgggcatagagtctgcagtcaggcaatatcacctgtcttgagccccttaggaagagttaattattctactcttgttctgctgaagcacagtgcttacccatcttgtatcatccacaatcaatacatgctactgtagttgtctgatagtgggtctctgtcttcctatgatgggctccttgatctcagaggtaggtctaattcagttcagtgtctccatcacacccagcgtagggccagctgcatcactggcacctgataacaccttctgatggagtgtgatagaaggtgatctagtagatctgaaagtctgtggctgtttgtctgtcttgactggacatgtgggtttcctgttgcatgcatagaggaaggakggtaaaaaggtgctgattttaattttccacatctttctccactcagcgtctttggggcctacagcatggatgtgatcactagcacatcatttggagtgaacatygactctctcaacaatccacaagacccctttgtggaaaacaccaagaagcttttaagatttgattttttggatccattctttctctcaataagtatgtggactactatttcctttaatttatcttnctctcttaaaaataactgctttattgagatataaatcaccatgtaattcakccacttwaaatatacagttcagtgatttgtagtacatttgaagatatgtgtgaccatcatcattttaaactttaaaactttttttgtcaatctagagacctcatacatttttagctatcagccccctgtcacaaaccctgtcatcatatgcaaccactaatcaactttctgcttctatggatttgcctattctggacacttcatagaaatgatattaattcatcagggttttttattctctagttcatgaatttgtactttagtctgtatcattttctttcttctgctggcttcaggcttagtttgcccttcttcgtttactatgttgtggcatgaacatagattactgatttgtgatttttttgttcctctaaatttagacattacagctgtaactttccctctgagcacttcctttgctaaatcccatgagattgtggcctatcacatcttagttttgttcacctcaaaacagtttctatttgccctttgggtttctactttgactcattgggtacttaaatgtttattatttaacttccacatatgtgtgagtttctcaattttctttcccttattgattttatctttattccatgataggtgacagagatatgctgtgttatttctatcttgactacctactatttcttgaacagcaagattaattttgagcttcagattatgatttgggttattctaggagactgtagtccaatagataaaggcaaagagattagggcattgaattttgttccttttatccttcaaaagatgcacaaggggctgctgatctcactgctgtagcggtgctccttatgcatagacctgcccttgctcagccactggcctgaaagaggggcaaaagtcatagaaggaatggcttccagttgagaaccttgatgtcttttactcttctggttggtagagaaaactagaattgctccaggtaaattttgcacattcacaatgaatttctttttctgtttttgttttgtttttcctacagcagtctttccattcctcatcccaattcttgaagtattaaatatctgtgtgtttccaagagaagttacaaattttttaagaaaatctgtaaaaaggatgaaagaaagtcgcctcgaagatacacaaaaggtaaaatgtggtggtagttataggaggatgtttagtttttcataattttttagataatatacatatgatcagtgcagttacctgtatgttt

SEQ ID NO: 68 - DNA, 1820 bp, Homo sapiens 712037
  misc_feature (808)..(808): n = g or a
agattttgaatcagtagttcaagggtggggtttgagattttgcatttctaaatgagctctcaagatgcttctgacccatggaccacactttgaataccaagaagtggtctgtagaccaatattggtcccttaagttccctcaaacatatcttcgggaaacgtcctttgattttccctacatttaaccattagtgttgcaaattctctcaaagtttgtcaagatatattgtagctaaaataaattacatttttcttgggggagagtactacctcatattaacttacaataaagtacttttaggatcattcaaggaacacacccataacactgagtatgttatgcggaaatgctctctctggaaattacacagctgtgcaggtggcgggggtggcatgaggaggagtggatggcccacattctcgaagaccttggggaaaactggattaaaatgatttgccttattctggttctgtaagatacacatcagaatgaaaccacccccagtgtacctctgaattgcttttctattcttttcccttagggatttgagggcttcacttagatttctcttcatctaaactgtgatgccctacattgatctgatttacctaaaatgtctttcctctcctttcagctctgtccgatctggagctcgtggcccaatcaattatctttatttttgctggctatgaaaccacgagcagtgttctctccttcattatgtatgaactggccactcaccctgatgtccagcagaaactgcaggaggaaattgatgcagttttacccaataaggtgagtggatgntacatggagaaggagggaggaggtgaaaccttagcaaaaatgcctcctcaccacttcccaggaraatttttataaaaagcataatcactgattctttcactgactctatgtaggaaggctctgaaaagaaaaagaaagaaacatagcaaatggttgctactggcagaagcgtaagatctttgtaaaacgtgctggctctggttcatctgctttctattactacaataatgctaagtaaaaaacctccaaaaacctcagtggcatctaacaataagcatttgttgctcacactcatttcaattggttttggttgtgaattacatgtttgcagcaggcaccatagtggtgtgtgatgtccccttagctgtatccacatatggacacaggaattggctctttttatctctttttattttcttggttacagacatgtgacttttttttttgaaaggtaacaatcactttctcatatgttatttgatgctagtggtcatagcctatagtcacatttgtttcaatgagaaagaaaaaccagtacacggttatgctaaggatttcagtccctggggtgagagccgtctcgaatgtctccccacttcataactcctccacacatcatagttggatagtgagctctgctgatattggcaggacttgctctggtctggctgtagtctgacggagcctggccctgggtgtgctgtgcaggctgactcagctctccccacacctatctcatgttccagtcaggcagtaactggtgaagaagccaagctaggaaccaggatatctggctcctgagctaaagtcttaaaacactatcatattgccttccaaatataacaccaaatactaggtgcatatcaccctcactgttttcagacctctgccaaaattgggattctttgtggtatgaagagacacggctttggggctggcccggctgtgacagtgaggtgaacacaaagggatgttcttcagagattacagtccagccctgaagcaacaacta

SEQ ID NO: 69 - DNA, 2240 bp, Homo sapiens 712047
  misc_feature (1005)..(1005): n = t or c
gagtctcactctgtggcccaggctggagtgcagtggcttgatcttggctcactgcaacatccacctcccgggttcaagaaattctccagcctcagcctcccgagtagctgggattacaggcgcgggccaccatgcccagccaatttttgtattttgagtagagacagggtttcgccatgctggccaggctggtctcgaactcctggcctcaagtgatctgcccgcgttggcctccccaaagtgttgggattacaggcgtgagccactgcgcccagtcacaattatttcttaataaacttacacagttcacataaaaacaaatgtgttagcttgaactatactatggttatcatttgtgttgattatgctactttattaattttctttatttgaagtaagtcttattatactaatatttctctcctatttgaaaaatctttttttctaagacagttctctcctaggcaaagtaacatctaatcaaaattactagctcacacttttttttttttcttactaatttacctctgtggagctattcatttgaatcaacattctttttttccccccaaccaagcataaatattactcattttaaatgaatggctttaaagttgatattctgttatgtgctctttagcaggtaatatgttaacaattatgtttggtaatcacagaaaatgacactggttctaaaataaacaaatagatataactgtacatacaaatccactcacacacctgctagtgctgtcaaatgcctcctttatcactgcgaacccttcagatgtttcgagccaggctttcacttctgcagagtcacaagcacgtggaagacgcacaactgggccacgagtcatcccatctgcaaggactcggctgctggcacctccaccaagctacacagtatatgttagagaagcaagcacatgttacccaaaaatgctcatgcttgacccaaaaggtatcactaattgtccttaaaactcttctcattgccttacntatgatgtatttttaaactggcaaatatataaatgccaacttacacctattgctctgcagcctctattggtgctggccacaagacaaccttctgttgttgccattggaacctgaaattctttttcatctaagcaaaggggtcctgccactccaacagggatgggcatatatscaataacattctcacaacaagctcccatcacctaaaaggtaaagtcaggcaccaaatgaaaatctatatagtaaatgcacaaaattttatctcagcttgtcagtataactatcttcaaacttaatcctttagtatgtattctttttaaacaaaatgtttaattcacctttaaaaagtgtttaaaatactaaaatctttgagtaatgactataaaagcaggaaatatatttttaatttctatgacctacatcataagcagaataaaaaattaggataaaatgatttaaaaggaaaatgttttataaaactatgtacatatatgaaactaatcaagaaaaaagattaaaaacatacaaagcaaatctctcttaatcgagaaaataacatmccaaggagtaattataatccctgtaaggtaggtactggagagaagaaggttctgaaagcttcttggaaagtaactgtcggcgaatagatacaccacgctcatgagtttccatcagagtttccaacttgtaggctgggatatgcttagcattgactaactggatgatctcagcatcactaaggaattttgcacctttctaaagaaatggagaaaaaaaatgaaattgtggtcagagagagagatgaaacagaagacttgaaggactgtatttcatgttataaaccatttaatacaaacaatgctaagctaaaataatgtaatttttaaattaaatcactgtagtttttaattaaaagatacctctgcaaaataattcatttaatgcaaaaaatgccaaacaaaaataatataaataccgtatcattagattttacaatacaaagacaggcttgcactaatacaccataaaaagaaaaataaatgtgaatttagcaaggtttcaagtgtgtgtcagatataacagctattgtttaaactctagtaaacttgctatttttgatatcctgaacaggcaatatattcacatggtttaaaaactaaatattaaaagagatataacaaaaagtcttcatcccatccctgtctaccatctgcccagttctttgctacctacac

SEQ ID NO: 70 - DNA, 1382 bp, Homo sapiens 712051
  misc_feature (743)..(743): n = a or t
gtgcttagggatggaggaccagacaaggttagagggactttggttctgaggcagcttctaaggcctctcagtgtcaaagcactggtcctcagggaatcactttctcagcccaacactgccttggtggatatcctagctctgcttctcagtaactttctagcatctcacagtttatgaccggctatgagtggcctctgaaaacacattgaaagtgcatagagaagcccctcaaagccacctgcagtggacgctccactgcgtgccagtcttaggtgtcgctgcagaaaagcacaagaacttgagagccctgtacgctgacaagagtgattttcctcctggaataaaggatttcttaccgagagctagcagggcgatgtgagaaagcactatctgccaggtttgacagctaggtaatttcaaattggaatttcagatttggccttcacttgtctttcctttgaaatttccattgcatttcccagacatttattgagtccacttgtcagcttgggtgaaaaatactgcctacccatcactttctgatttttcctttcagccaagactgaatgccactaatgggccattacctgaaggtaccgtgaagggcgagcttgtccttgggaaataaacctctggtgtgaattattccacttgcatctgaccagcgtcaacactgatggcctgtggagtgggtaggtttgtatccactcaacagcctaattacattccataaatgttggtancctttcctttgctatctccgcaaatgtaagtatctgtagttcctgtttctcttttcagcctacagaatattattattttttccctttctttacaagcaagagcacaaatgaatttactagagctgactggctccagttcctttggaacaaatgctaagcataacaggatcagacataaggaaaaaaatttaaaaggatgtttgatagaaatattttcaaaattatgctgtaaaaacctaggtggagttcatagttatggatataattttgtctgtagaggacaggatcaagttttacagatgtgttgatgaaaagattaaaactcagtaaaattgaagagatgtattctaagccaaatatgagtgacctgtggcctgtgatacagccctcaggagatgttgagaacacgtgcccaaggtggtcaggttacagctcggttttatatgctttaaagagacataaagcatcagtcagtacatgcaaggtgtatatcgatttggtctgaaaaggccggaaaaccggaagtggaggattccaggtcataggtagattcaaagattttctgattggcagttggttgaaacagttaaattattgtctaaagacttagaatcaatagaaaggaatgtctgggtcaag

SEQ ID NO: 71 - DNA, 915 bp, Homo sapiens 712055; identical to SEQ ID NO: 16
  misc_feature (418)..(418): n = g or a

SEQ ID NO: 72 - DNA, 1629 bp, Homo sapiens 712059
  misc_feature (884)..(884): n = c or t
aaccccaaaagtgtaaaatatctgaactgaaaagagaaaagtgaaaataccaccaaacccccagcctgctctctctctcactgctgtcccagccacaaagctttacagcaaatggacagaaagccctgagggaagacagagggggtgctgaggtgatcagaaggtccaccagaaggggccagggggaactgggccctgggaggtgctgtgagaggagcaggagcacagaaagggcccatctgggggcatgcagccttggggaggaaagagcaaagaggaagggaaagctcctttgggcaaccaagtggtcaagtggaaaagaaaaggaggtaaaagcggggttccgcaaggcaggagtcggaggactgtgctctgcccgcagaagagcgccaggaatcctacaaaacacaaacaagcccaacggcattaaatgaacaagagaaaaatgaagtcacacctacagagctagtgcaaacgctatcaggagcggaaatgtcacatgtatcagctgaggaaaatcccctctgaaaataaccatgaagcatgtagaagaaaactacaagcccacacttcaaaatgaattcgccatgcccatgcctcaagcaagcatcaaaaatacaaacccaccttaaatcagagatttgaaaacagaaatgggcaaataacagggagaaataaaaagttgattgaactcaaggatgaggtaaccaagttttctcagaaataaggggttgtttaatgggtacaaaaaatagggttagttagaagtaataagttctagtgtttgatagcatgatagggccactataattaacaataacttattgtatattttaaaataactggaagaaaggacttggaatgttcccaaaacaagtaacaanaaatgtttgaggttatggatatcctaattaccctgatttcatcattacatattgtattattgtatcaaaatatcacatgtcccccataaatatgcaacaactattatgtactcagagaaatcactttacaaaagaaatgagaaataaattaaaagatgcccaaaagacaatagacaaaaatgaaaatataacaagggtcactaaataaagatatcaaagcaagtgagagaataaaaatgaataagtaaatagataaattaaaagggcagagatagtagtggaaatggaacccgggcaatgaaggaataatatttgtttattggagtccttaagggaaaaaaacaaatagtagaatgaagctaatatttaaaactaaaatctctgttacatgttctagtaaaactataagatttcaaggaagaagataaaaatcatcaaggccgcacgcaaaacaatcagactgacatcaggtcttccaaaatcaagatataaacaaaacgacaatggagcaatatttttaaaaataagtcaatgaaaaaaaaaagtgtaacaaaggattccaatccagccaacttacaaagaacagtctatttggctcatggttctgtagcctctgaaagtagaggcagacaccaacatccactcagcttctggtgagggcctcaggctgctcccacttgttggggaaggtaaaggggacccagggcatgctgagatcacatggcaaaagaggaagcaagagagt

SEQ ID NO: 73 - DNA, 1540 bp, Homo sapiens 712043
  misc_feature (744)..(744): n = t or c
agccaatccagacaaacatttatatttaaacatttatatttaaacaaaaggcctctctgaacaaatagcctgcggagataaatacagtgatttgttttcctgatagaactatttagcatgtttaacacattattctgtagtttgggaataagagtgtttcttcccttgaagaaaacaggtccccttctgaagaataatgctgattaccccccaaaatcaaaatagaccagcaccaaatgaagtattaatttacaaacatgaacttagaacttagctcttacttcttgaagttctacatcccagacttaataaattaactacaaaatcaggagtttcatcagctacagtataatttaaaaatccattttcaactggcaggrgtgagggagaaggtcaattgcactgatcaccatgaacttcaagaatttcatcaaaacttttttcccagcttatatttgccttcagaggtgagctgtagattaccatctctgatgctttaacatacaatattcttgttgaaatctcttcaaagagcacagcatgtaaagcactaaactgtgttcagatctgaggagtctgcatggaaagaacctgagacctctctgaaagagccaaaaaccaagtggctgtctcagtgatcacatctattcatcctccacaagacaatgcattgagcttttttaattcacagattttatgttagtcctttagaacccaatgcccatgttccagttcagaactgtngggctattcaggctgtcttcttggtgcaagctccttggaggtcttgtaaattgatcttcgacctatggtagaaaatgacaaagtagcaatatataaatatcaggagtgtagaattttaacttggaactacagtagatgaatagtaagtttttacactgcatattttttgaagtatagggggaacatgttaaatatatctttgagtcttacctgttgtgaatcatgtgacttttgacaagatgtcctgctgccaatgctgccataagtgacaattccccagccattacggtcccacacacaattcgggcaagctgccgggcattttccccaggattatctttgcatgctccttgaacacctagcatctgtagccagggagagacacaacaagattcacccttaaaatcatgaccaatttcttactaaatcaactaaaaacagggcaactgtaatggcatcagaatagaactagactccactggaagcactaactttccaagacttgacagccacacctgacagtgcataataccatagctaacataatattcacagcctgactggcagtacccttaactcagtagatgaacattcatttgctctcttcatctactttcttatctaagcataagcttaaacatgcttatttggacacaatggattaggctgatatgacaaaagagtttggaaaagaccaattaaaatagaggtgagtgatacatagtctcagatagaaagagaaacccagagagtcagaactaggcttgtggactctatgcctgatacatcatacctg

SEQ ID NO: 74 - DNA, 840 bp, Homo sapiens 756239
  misc_feature (360)..(360): n = g or a
acagaaaaacaagcaatcaatctctagtctcggttcatactaagagccatcaccccaacacctcaaccaggccatatataaccacctccctgtggcctgtccccatacccactgctattttcctgcccacattaccttctgataccagcagatctgtccccggcgggtaagggatgaatccatgatgtcatctgccaccaggaagaaagcttgcagctagaaagagtggaataagacctgcagggctcctcattactgttccttctatcagcaacagagctgctactttatatctgtatatagttttgcttttttttggtaggggacagagtctcactattatccagtgcagtggtgcantcacagctcactgtagcctctaactcccaggctcaagtgatcctcccacttcagcttcctgagttcctgagaccataggcacataccccatgcctggctattttttttttttaatttattttttgtagagacagggtcccactatgttgctcaggctggttttgaacccctgggttcaaatgatcctcctgcctcagcctcccaaattactgggattacaggcatgaggcatcacagccggccagagctgctgcctttgacagtccctatgagctgggaaagtcaggatggggagacagaagacttctgtgctatggagacttggaaagtgacataacatgtttggctcagactccccgcctataaaatggaactaaaacactcttgttttaggttaagaaactagaacagatctttgacatctctaatgagccctagattattcctggtgtcagggagattaggaaacaccttcatata

SEQ ID NO: 75 - DNA, 1190 bp, Homo sapiens 756251
  misc_feature (455)..(455): n = g or a
tgagtgcaaaggcggtcagggtgggcagagacgaggtggggcaaagcctgccccagccaagggagcaaggtggatgcacaaagagtgggccctgtgaccagctggacagagccagggactgcgggagaccagggggagcatagggttggagtgggtggtggatggtggggctaatgccttcatggccacgcgcacgtgcccgtcccacccccaggggtgttcctggcgcgctatgggcccgcgtggcgcgagcagaggcgcttctccstgtccaccttgcgcaacttgggcctgggcaagaagtcgctggagcagtgggtgaccgaggaggccgcctgcctttgtgccgccttcgccaaccactccggtgggtgatgggcagaagggcacaaagcgggaactgggaaggcgggggacggggaaggcgaccccttacccgcatctcccacccccangacgcccctttcgccccaacggtctcttggacaaagccgtgagcaacgtgatcgcctccctcacctgcgggcgccgcttcgagtacgacgaccctcgcttcctcaggctgctggacctagctcaggagggactgaaggaggagtcgggctttctgcgcgaggtgcggagcgagagaccgaggagtctctgcagggcgagctcccgagaggtgccggggctggactggggcctcggaagagcaggatttgcatagatgggtttgggaaaggacattccaggagaccccactgtaagaagggcctggaggaggaggggacatctcagacatggtcgtgggagaggtgtgcccgggtcagggggcaccaggagaggccaaggactctgtacctcctatccacgtcagagatttcgattttaggtttctcctctgggcaaggagagagggtggaggctggcacttggggagggacttggtgaggtcagtggtaaggacaggcaggccctgggtctacctggagatggctggggcctgagacttgtccaggtgaacgcagagcacaggagggattgagaccccgttctgtctggtgtaggtgctgaatgctgtccccgtcctcctgcatatcccagcgctggctggcaaggtcctacgcttccaaaaggctttcctgacccagctggatgagctgctaactgagcacaggatgacctgggacccagcccagcccccccga

SEQ ID NO: 76 - DNA, 910 bp, Homo sapiens 809125
  misc_feature (519)..(519): n = t or c
tcacttgaggtcagaaattaaagaccagtctggccaacatggcaaaactccgtctctactgaaaacacaaaaattagccggggatggtggtgcacatgtgtaatcccagctactcaggtggctgaggcagaagaatccctcgaaaccaggaggcgaaggttgtggtgagccaagatctcgccactgcactccagcctgggtgacagagtgagactacatctcaaatcaatcaatcaatcaatctaccctgggtttctcttccattagatcttgttctgctctctgatgtgtttcactaggaaaatactcttatttacccaaaaattattattaccataagttctgaaaactttcaaaaagaaaaatgggggyaattccaaattccagtagctacagaatcataattgagttgttagatacaggggactgttcctggggcacttatggagaccagtcttgggacttragaattaaacttaaaactttgggcaattcttaaatcttgtgctatgaagaaangctattaatccttcctattaatgtaaactgaaaaaaggaatactattcacattcctatcttataaataatacttacctgtgagttggaactgagggcaaactttgctaatgtgcttgctctggaaaggtcaatcaaaagtaggaaaaagggcaaagcttcactggaaaagaacaaaatgatcagataaatttaacgggaaaaagtatgattttaaaaaaattctttttagaacaaaacctttccccctccatactgtatgatcctgtagtatgtgtacctttctgcagacaaaaaagtataccctatatttctttggcatcctcaaagctaaacatagtagttgctcaaaatatttgttaaaaatatttttaatgttaaaatgtaagtata

SEQ ID NO: 77 - DNA, 557 bp, Homo sapiens 869769
  misc_feature (277)..(277): n = a or c
accgaggttcctctgtccacgcttggcaccagcagcrggcactgtgccaggccaggactgggtacccgtgcaccagggagggccgccgtagggaacccagccacctctcccggggtgcccagtagggggctggcagcaggaagacccccacagatctcaaccagcgggrcaggggcatcctgggagtggcatagggagggggcactaascactccctgcaggggcaagcaccaaaggcagaggcatggtggcagctccccagataactcccaccccnttagcccagagtgcccctccctcttgtggaatgtgcttggggacaattacaggaaggatacgcagggaacaaaaaagtatggctgggtgactgagacccaactaatcaccacttacaataaacaggctagaactcagtgccttcaagatggcgtgyacaaggctgggtaaggaggcggtacagagtaaagtaccccaggattaggggctgaaaggacccttaagtcatcctattttacacaagccaaactgaggctctaggaggtaggaagatagtagag

SEQ ID NO: 78 - DNA, 490 bp, Homo sapiens 869772
  misc_feature (227)..(227): n = t or c
cactatttatctcatctcaacaagactgaaagctcctatagtgtcaggagagtagaaaggatctgtagcttacaattctcatagcaaaataagcatagcaggatttcaatgaccagcccacaaaagtatcctgtgtactactagttgaggggtggcccckaagtaagaaaccctaacatgtaactcttaggggtattatgtcattaactttttaaaaatctaccaangtggaaccagattcrgcaagaagaacaaggacaacatagatccttacatatacacaccctttggaagtggacccagaaactgcattggcatgaggtttgctctcatgaacatgaaacttgctctaatcagagtccttcagaacttctccttcaaaccttgtaaagaaacacaggttagtcaattttctataaaaataatgttgtattaataattcttttaactgagtggtctgtattttttaaaaagaatatgcttgtttaat

SEQ ID NO: 79 - DNA, 490 bp, Homo sapiens 869777
  misc_feature (270)..(270): n = g or c
tgagtgcaaaggcggtcagggtgggcagagacgaggtggggcaaagcctgccccagccaagggagcaaggtggatgcacaaagagtgggccctgtgaccagctggacagagccagggactgcgggagaccagggggagcatagggttggagtgggtggtggatggtggggctaatgccttcatggccacgcgcacgtgcccgtcccacccccaggggtgwtyctggcgcgctatgggcccgcgtggcgcgagcagaggcgcttctccrtntccaccttgcgcaacttgggcctgggcaagaagtcgctggagcagtgggtgaccgaggaggccgcctgcctttgtgccgccttcgccaaccactccggtgggtgatgggcagaagggcacaaagcgggaactgggaaggcgggggacggggaaggygaccccttacccgcatctcccacccccargacgcccctttcgccccaacggtctcttggacaaa

SEQ ID NO: 80 - DNA, 490 bp, Homo sapiens 869784
  misc_feature (216)..(216): n = g or a
gccgtgagcaacgtgatcgcctccctcacctgcgggcgccgcttcgagtacgacgaccctcgcttcctcaggctgctggacctagctcaggagggactgaagraggagtcgggctttctgygcgaggtgyggagcgagagaccgaggagtctctgcwgggcgagctcccgagaggtgccggggctggactggggcctcggaagagcaggatttgcntagatgggtttgggaaaggacattcyaggagaccccactgtaagaagggcctggaggaggaggggacatctcagacatggtcgtgggagaggtgtgcccgggtcagggggcaccaggagaggccaaggactctgtacctcctatccacgtcagagatttcgattttaggtttctcctctgggcaaggagagagggtggaggctggcacttggggagggacttggtgaggtcagtggtaaggacaggcaggccctgggtctacctggagatggct

SEQ ID NO: 81 - DNA, 420 bp, Homo sapiens 869785
  misc_feature (172)..(172): n = t or c
ggctgctggacctagctcaggagggactgaagraggagtcgggctttctgygcgaggtgyggagcgagagaccgaggagtctctgcwgggcgagctcccgagaggtgccggggctggactggggcctcggaagagcaggatttgcrtagatgggtttgggaaaggacattcnaggagaccccactgtaagaagggcctggaggaggaggggacatctcagacatggtcgtgggagaggtgtgcccgggtcagggggcaccaggagaggccaaggactctgtacctcctatccacgtcagagatttcgattttaggtttctcctctgggcaaggagagagggtggaggctggcacttggggagggacttggtgaggtcagtggtaaggacaggcaggccctgggtctacctggagatggct

SEQ ID NO: 82 - DNA, 350 bp, Homo sapiens 869794
  misc_feature (176)..(176): n = g or c
tgaacatcacaggccatctgagtggcaagtataatcatcatcatgtttctatttaaaattcagaaatatttgaagcctgtgtggctgaataaaagcatacaaatacaatgaaaatatcatgctaaatcaggcttagcaaatggacaaaatagtaacttcgtttgctgttatctctntctactttcctagctctcaaaggtctatggccctgtgttcactctgtattttggcctgaaacccatagtggtgctgcatggatatgaagyagtgaaggaagccctgattgatcttggagaggagttttctggaagaggcattttcccactggctgaaagagctaacagaggatt

SEQ ID NO: 83 - DNA, 350 bp, Homo sapiens 869797
  misc_feature (145)..(145): n = t or c
tgattgatcttggagaggagttttctggaagaggcattttcccactggctgaaagagctaacagaggatttggtaggtgtgcawgtgcctgtttcagcatctgtcttggggatggggaggatggaaaacagagacttacagagcncctcgggcagagcttggcccatccacatggctgcccagtgtcagcttcctctttcttgcctgggatctccctcctagtttcgtttctcwtcctgttaggaattgttttcagcaatggaaagaaatggaaggagatccggcgtttctccctcatgacgctgcggaattttrggatggggaagaggagcattgaggacmgtgttcaa

SEQ ID NO: 84 - DNA, 350 bp, Homo sapiens 869798
  misc_feature (164)..(164): n = a or t
tggtaggtgtgcawgtgcctgtttcagcatctgtcttggggatggggaggatggaaaacagagacttacagagcycctcgggcagagcttggcccatccacatggctgcccagtgtcagcttcctctttcttgcctgggatctccctcctagtttcgtttctcntcctgttaggaattgttttcagcaatggaaagaaatggaaggagatccggcgtttctccctcatgacgctgcggaattttrggatggggaagaggagcattgaggacmgtgttcaagaggaagcccgctgccttgtggaggagttgagaaaaaccaagggtgggtgaccmtactccatatcactga

SEQ ID NO: 85 - DNA, 350 bp, Homo sapiens 869802
  misc_feature (166)..(166): n = g or c
tgggaatgtaaatttagcatttgaacaaccattatttaaccagctaggttgtaatggtcaactcaggattaatgtaaaagtgaagtgttgattttatgcatgccgaactcttttttgctgttaagggaatttgtaggtaagataatttctaaactactattatctnttaacaaatacagtgttttatatctaaagtttaatagtattttaaattgtttctaattatttagcctcaccctgtgatcccactttcatcctgggctgtgctccctgcaatgtgatctgctccattattttccakaaacgttttgattataaagatcagcaatttcttaacttaatggaaaagt

SEQ ID NO: 86 - DNA, 420 bp, Homo sapiens 869809
  misc_feature (213)..(213): n = t or c
tcctttattgaagagaattttctccacttatatgtgtacagatttttcttaatatctggtttatggcagttacacatttgtgcatctgtaaccatcctctctttaagtttgcatatacttccagcactataatttaaatttataatgatgtttggataccttcatgattcatatacccctgaattgctacaacaaatgtgccatttttctccntttccatcagtttttacttgtgtcttatcagctaaagtccaggaagagattgaacgtgtgattggcagaaaccggagcccctgcatgcaagacaggagccacatgccctacacagatgctgtggtgcacgaggtccagagatacmttgaccttctccccaccagcctgccccatgcagtgacctgtgacattaaattcagaaactat

SEQ ID NO: 87 - DNA, 420 bp, Homo sapiens 869810
  misc_feature (218)..(218): n = a or c
tataatgatgtttggataccttcatgattcatatacccctgaattgctacaacaaatgtgccatttttctccytttccatcagtttttacttgtgtcttatcagctaaagtccaggaagagattgaacgtgtgattggcagaaaccggagcccctgcatgcaagacaggagccacatgccctacacagatgctgtggtgcacgaggtccagagatacnttgaccttctccccaccagcctgccccatgcagtgacctgtgacattaaattcagaaactatctcattcccaaggtaagtttgtttctcctacactgcaactccatgttttcgaagtccccaaattcatagtatcatttttaaacctctaccatcaccgggtgagagaagtgcataactcatatgtatggcagtttaactgg

SEQ ID NO: 88 - DNA, 350 bp, Homo sapiens 869813
  misc_feature (157)..(157): n = t or c
tctggatgaaggtggcaattttaagaaaagtaaatacttcatgcctttctcagcaggtaatataaatttatttccatttgtgtttcagggtacaagataacttttttgwtccattggaacttacatgtgcctcctctgcagtggtacaattactctntgtacatgatcaagagcactgttctgaatgcctgtgtacaccctgctcatgatacatcctaattattgggccagattagtggactttggggagttaatccaattcttccaaattgagaaagctgaaatataggttggttgaattctgcctctaggtacaccagtgaggtacccaagaactcctcctggaagat

SEQ ID NO: 89 - DNA, 1820 bp, Homo sapiens 886934
  misc_feature (837)..(837): n = c or t
cttctcaaggcaccaaagaaatgagaaataacaaggaaatgtatgttttaaagaaccgaatgaaataagcatgtgatcttgaggccagcatttttaaaaatgtgagatcagctttgaatggaaactaggtctctgatctaaaaaacaatgggcagaaagatttactctgcttctgtttagcatttttatcagtataaatttaggcagaagcctgagtcttaaaagtttagattctaaggcagggttccctaaataaaacaccttcccgtgctcagtgtgaaagagtccattggcctgttgccaaaccagaatctaaatgcctagtcattcaaattaaatttaaaaacagaagcaaaacaaaaattagcactccacaaaacatattttaaggctggatctggctccagactaagagttaatgatgcttgaattaaagataggaaaatggaagaaggtggaaatgccaagaagtggatgttgttattgataacttttttgtataaccaatataaatgtaattatctgcctaaaaaagaaaaagaagaccctttatccctttaaatcattttcagaaatgtctgcataatgagttgagtttcattccctctaatgcctaaatgacaccttgtaataaattaccagctttgttaaataaggttttaactcctctgggcccctcagacaccgttgatatactaaccagtaccttattgtctgaagagagctaayagaaatagactgtcagagagtagaccaaacagaaatgaataattgtaaacagaagcagagagtattaatgtggtttctgtgatctaggaaatgttgcaagagccttcnttctcccttccttactggaattttgcaacggggaaaaatgtctgtgatatctgcayggatgacttgatgggatccagaagcaactttgattccactctaataagcccaaactctgtcttttctcaatggcgagtggtctgtgactccttggaagattatgataccctgggaacactttgtaacagtaagttccaaatgatagcttggagtcagaatttctttttagataawgagattaaatatgttgcctgaaaggccttcattctactagagaattcagactaaaatctacttttattatagagtaacagtgtaccaggcattcattaaacacctagaatgttcaaggtactctakaagttgctccaggggaaacagaaagtgcctacacatttttacactgcctttcttgagtagtttggtcaatatcttgctaactttcttattttggaaatgtctagttgtataaactaatcctcttagttttcttagcactacttagaagtcatgtgtcttgtgttggaatttcacagaaaatgtttcctaagaaaatgtgaaaaataggcaaaaagttggaaatgccctgggaagaaaaaaaagaaaagaagcaaaccaaatgtatgcttgcagttataaagttagaaaacaaaagctgatatgggggatagttttcagaaaaggagtatattgtactgatgtctgccccctagctgctttccagctcttccaaagtgaacacagtaagagtacgcctaatcagtgtcccagcatcctttctccagtgatctgaatgccaccactgtcacaggtcaagtttctgccacatgtagatctcttcctgagctttctgttctcctccttggatcatattattatttgtgcctgtggtagtaacacaaggtttaattattagacaccccctacctcatcttatttttcttcttcaggcatgtatggctcttttgattgttcttccatataaa

SEQ ID NO: 90 - DNA, 490 bp, Homo sapiens 886993
  misc_feature (229)..(229): n = g or a
aaatccctggacacacatataggcacaaaactgctagcaagaggctccattcaaggagtgagtgagtgtactattccaggaagtgacggtctttctgcatctcagagtgaggagcttggtgatgtggtggctttcagaggccagagctcaaatgtgtaagggatcatgctgatgtcgttttaatatggtgtcctgctaaaagattatccttgtcttcttcttttccccntagatgatcttagtagccatattttcagaaacgggatttttcgattattgtgctgtaaaggtaggtatgatgttgcatttaataattctatcctgattaatttatatatgtatttttctgacattatatatttaggaaacaaacatttaaaacaaacattgaaaaattccatccttcttttaaaggttgcttctgcagggcagggtatacttgctatgttaagttgtatggctctgagcagcactttcagctgctcagtaa

SEQ ID NO: 91 - DNA, 350 bp, Homo sapiens 951526
  misc_feature (160)..(160): n = g or a
acattaaaaatagacattttattacaagagtgtagagaagggagaccaatagaaggtaattgaaataycmccccctcactccagccctagtcctggtgcctggatatgtgcactccctgtgcgctctgatccccgcagacacaagtccccagcccctccnggacagcaataagggtcttacaaggccagaaggcagccctgtttgttcctgcctgcaggaagggcagaggaatgtgatgttcccaggaactgtgtcctagacccatagggtcagattgctcagcctagttcaagcagtgagactacctctgtgccagtatcctgggctgtctcttcccttcactcttggc

SEQ ID NO: 92 - DNA, 488 bp, Homo sapiens 217472
  misc_feature (219)..(219): n = g or a
atatttattgaatacacactgggtatccagaatgtaaagagtctcaatacggaatgaattttatttttgattttatattttgaaacagtcttcaagttatagttataaatcaaatgggataatcacataggttttcagtcattaaagtaaacatatttttttcatttttttttaatgaacaggatttgctgatttgctagtccacttactgggatagcngatgcctctcaaagcagcatgcacaatgccttgcacatctatatgaatggaacaatgtcccaggtacagggatctgccaacgatcctatcttccttcttcaccatgcatttgttgacaggttggttaatatttctttataaataacgtgctcattggatttaaatagagggtgcctatcaaatgtgatttaagttattaaataaaagctaagaagttatggtagtctattgtctgtgatcaggttgtcaccaaaacagaccttaggcta

SEQ ID NO: 93 - DNA, 1270 bp, Homo sapiens 217440
  misc_feature (632)..(632): n = t or c
ggagagggtgtgagggcagatctgggggtgcccagatggaaggaggcaggcatgggggacacccaaggccccctggcagcaccatgaactaagcaggacacctggaggggaagaactgtggggacctggaggcctccaacgactccttcctgcttcctggacaggactatggctgtgcagggatcccagagaagacttctgggctccctcaactccacccccacagccatcccccagctggggctggctgccaaccagacaggagcccggtgcctggaggtgtccatctctgacgggctcttcctcagcctggggctggtgagcttggtggagaacgcgctgktggtggccaccatcgccaagaaccrgaacctgcactcacccatgtactgcttcatctgctgcctggccttgtcggasctgctggtgagcgggassaacrtgctggagacggccgtcatcctcctgctggaggccggtgcactggtggcccgggctgcggtgctgcagcagctggacaatgtcattgacgtgatcacctgcagctccatgctgtccagcctctgcttcctgggcgccatcgccgtggaccgctacatctccatcttctacgcactgygctaccacagcancgtgaccctgccgygggcgcsgcrasscgttgcggccatctgggtggccagtgtcgtcttcagcacgctcttcatcgsctactacgaccacgtggccgtcctgctgtgcstcgtggtcttcttcctggctatgctggtgctcatggccgtgctgkacgtccacatgctggcccgggcctgccagcacgcccagggcatcgcccggctccacaagaggcagcgcccggtccaccagggctttggccttaaaggcgctgtcaccctcaccatcctgctgggcattttcttcctctgctggggccccttcttcctgcatctcacactcatcgtcctctgccccgagcaccccacgtgcggctgcatcttcaagaacttcaacctctttctcgccctcatcatctgcaatgccatcatcsaccccctcatctacgccttccacagccaggagctccgcaggacgctcaaggaggtgctgacatgctcctggtgagcgcggtgcacgcgctttaagtgtgctgggcagagggaggtggtgatattgtgtggtctggttcctgtgtgaccctgggcagttccttacctccctggtccccgtttgtcaaagaggatggactaaatgatctctgaaagtgttgaag

SEQ ID NO: 94 - DNA, 1270 bp, Homo sapiens null
  misc_feature (1048)..(1048): n = g or c
ggagagggtgtgagggcagatctgggggtgcccagatggaaggaggcaggcatgggggacacccaaggccccctggcagcaccatgaactaagcaggacacctggaggggaagaactgtggggacctggaggcctccaacgactccttcctgcttcctggacaggactatggctgtgcagggatcccagagaagacttctgggctccctcaactccacccccacagccatcccccagctggggctggctgccaaccagacaggagcccggtgcctggaggtgtccatctctgacgggctcttcctcagcctggggctggtgagcttggtggagaacgcgctgktggtggccaccatcgccaagaaccrgaacctgcactcacccatgtactgcttcatctgctgcctggccttgtcggasctgctggtgagcgggassaacrtgctggagacggccgtcatcctcctgctggaggccggtgcactggtggcccgggctgcggtgctgcagcagctggacaatgtcattgacgtgatcacctgcagctccatgctgtccagcctctgcttcctgggcgccatcgccgtggaccgctacatctccatcttctacgcactgygctaccacagcaycgtgaccctgccgygggcgcsgcrasscgttgcggccatctgggtggccagtgtcgtcttcagcacgctcttcatcgsctactacgaccacgtggccgtcctgctgtgcstcgtggtcttcttcctggctatgctggtgctcatggccgtgctgkacgtccacatgctggcccgggcctgccagcacgcccagggcatcgcccggctccacaagaggcagcgcccggtccaccagggctttggccttaaaggcgctgtcaccctcaccatcctgctgggcattttcttcctctgctggggccccttcttcctgcatctcacactcatcgtcctctgccccgagcaccccacgtgcggctgcatcttcaagaacttcaacctctttctcgccctcatcatctgcaatgccatcatcnaccccctcatctacgccttccacagccaggagctccgcaggacgctcaaggaggtgctgacatgctcctggtgagcgcggtgcacgcgctttaagtgtgctgggcagagggaggtggtgatattgtgtggtctggttcctgtgtgaccctgggcagttccttacctccctggtccccgtttgtcaaagaggatggactaaatgatctctgaaagtgttgaag

SEQ ID NO: 95 - DNA, 560 bp, Homo sapiens 869743
  misc_feature (235)..(235): n = g or a
gttgctctagcaaggtaatatgttgaataacagttgaataacagaataaaaaaaaatctctgcaaagtaaacaaatctcactagtttatctgacttgtattccaaattagtgcttctggccttttcttaaaactttaagcatcacaaggaaatcagttggaagggaatcatgtgctgatcaagtccttaaagggcagaaatattcactgaagtgaaaaggattagtaaagggtgnaaaaaaagaccagccccccgcctagtttgggtgagcagatttgkgattaattatcaggcagcaatccacatgcacttaacagttctgacgtgagaggacaagaaacacaagcaaatataaaacattcaattctaagagaagttcatcagagacatccttcaggattgtgaggtactggaaagaagtcctatggggagtgggtggacacgtgccaaaactccattagtgtaagggactttaaatcacagaaattaacttgctggaaatcygttcccaattcttccttcagctccaaggttaaattaaatgtaattaatgatggtga

SEQ ID NO: 96 - DNA, 19 bp, Artificial sequence
  OCA2_5 primer
caatcacagccagtgctgc

SEQ ID NO: 97 - DNA, 21 bp, Artificial sequence
  OCA2_5 primer
gcggtaatttcctgtgcttct

SEQ ID NO: 98 - DNA, 20 bp, Artificial sequence
  TYRP1_3 primer
aaagggtcttcccagctttg

SEQ ID NO: 99 - DNA, 25 bp, Artificial sequence
  TYRP1_3 primer
gtggtctaacaaatgccctactctc

SEQ ID NO: 100 - DNA, 34 bp, Artificial sequence
  PCR primer
gagtatgtgaagatataagtaagtgaactaccat

SEQ ID NO: 101 - DNA, 27 bp, Artificial sequence
  PCR primer
actgtggttttctttaaatctgttgac

SEQ ID NO: 102 - DNA, 45 bp, Artificial sequence
  Primer extension primer
agcgatctgcgagaccgtatatttctaaaatgttaaaacataaac

SEQ ID NO: 103 - DNA, 22 bp, Artificial sequence
  PCR primer
aaggagaaggcaagatcctaag

SEQ ID NO: 104 - DNA, 22 bp, Artificial sequence
  PCR primer
gccctcctgagagctacaattt

SEQ ID NO: 105 - DNA, 45 bp, Artificial sequence
  Primer extension primer
ggctatgattcgcaatgcttcaattagtaatctggagagataaaa

SEQ ID NO: 106 - DNA, 45 bp, Artificial sequence
  Primer extension primer
ggatggcgttccgtcctattcaattagtaatctggagagataaaa

SEQ ID NO: 107 - DNA, 21 bp, Artificial sequence
  PCR primer
tggcattcatcttgatcttgg

SEQ ID NO: 108 - DNA, 21 bp, Artificial sequence
  PCR primer
ctgtgggcaaagtcagtgtct

SEQ ID NO: 109 - DNA, 45 bp, Artificial sequence
  Primer extension primer
acgcacgtccacggtgatttggttcataggctttgtcacattctg

SEQ ID NO: 110 - DNA, 25 bp, Artificial sequence
  PCR primer
agccattagcttctgattactttgc

SEQ ID NO: 111 - DNA, 18 bp, Artificial sequence
  PCR primer
ggccagagctggctggtg

SEQ ID NO: 112 - DNA, 45 bp, Artificial sequence
  Primer extension primer
acgcacgtccacggtgatttttttggtgaaataatttccatgatt

SEQ ID NO: 113 - DNA, 25 bp, Artificial sequence
  PCR primer
gtggtctaacaaatgccctactctc

SEQ ID NO: 114 - DNA, 20 bp, Artificial sequence
  PCR primer
aaagggtcttcccagctttg

SEQ ID NO: 115 - DNA, 45 bp, Artificial sequence
  Primer extension primer
agggtctctacgctgacgattctttctaatacaagcatatgttag

SEQ ID NO: 116 - DNA, 29 bp, Artificial sequence
  PCR primer
taacgacatcaatatttatgacctctttg

SEQ ID NO: 117 - DNA, 20 bp, Artificial sequence
  PCR primer
gcagaaaagctggtgcttca

SEQ ID NO: 118 - DNA, 45 bp, Artificial sequence
  Primer extension primer
cgtgccgctcgtgatagaattcaatggatgcactgcttgggggat

SEQ ID NO: 119 - DNA, 19 bp, Artificial sequence
  PCR primer
agtggcccaagctcactta

SEQ ID NO: 120 - DNA, 20 bp, Artificial sequence
  PCR primer
aaggcaaatgggaaatccaa

SEQ ID NO: 121 - DNA, 45 bp, Artificial sequence
  Primer extension primer
agatagagtcgatgccagctgtcgagggaccaggccccacaagag

SEQ ID NO: 122 - DNA, 20 bp, Artificial sequence
  PCR primer
ccctggggcaaccttactaa

SEQ ID NO: 123 - DNA, 24 bp, Artificial sequence
  PCR primer
cagcattttgttcactcagttctc

SEQ ID NO: 124 - DNA, 45 bp, Artificial sequence
  Primer extension primer
ggatggcgttccgtcctattaaacatatcacctactatgacagta

SEQ ID NO: 125 - DNA, 22 bp, Artificial sequence
  PCR primer
gcatctaaggccctctgtacct

SEQ ID NO: 126 - DNA, 27 bp, Artificial sequence
  PCR primer
tagaaagcaatcaagatgatttcagag

SEQ ID NO: 127 - DNA, 45 bp, Artificial sequence
  Primer extension primer
gcggtaggttcccgacatatctctttcataaatttgaacttaatt

SEQ ID NO: 128 - DNA, 20 bp, Artificial sequence
  PCR primer
taaggtcgttgtttcgttct

SEQ ID NO: 129 - DNA, 19 bp, Artificial sequence
  PCR primer
atgagccatcaaaagaggg

SEQ ID NO: 130 - DNA, 45 bp, Artificial sequence
  Primer extension primer
agagcgagtgacgcatactacagagagacggtgtccatcagcatc

SEQ ID NO: 131 - DNA, 18 bp, Artificial sequence
  PCR primer
gcctggactttgccggat

SEQ ID NO: 132 - DNA, 18 bp, Artificial sequence
  PCR primer
gcctggactttgccggat

SEQ ID NO: 133 - DNA, 45 bp, Artificial sequence
  Primer extension primer
gtgattctgtacgtgtcgccctgcacacatgttcattgggatttg

SEQ ID NO: 134 - DNA, 27 bp, Artificial sequence
  PCR primer
gacacgaatttttattggacatgttta

SEQ ID NO: 135 - DNA, 20 bp, Artificial sequence
  PCR primer
agggttatgctcaaggccat

SEQ ID NO: 136 - DNA, 45 bp, Artificial sequence
  Primer extension primer
agcgatctgcgagaccgtatttattgtagtagatgttcatgattc

SEQ ID NO: 137 - DNA, 18 bp, Artificial sequence
  PCR primer
gctgcgtctaccccgcat

SEQ ID NO: 138 - DNA, 27 bp, Artificial sequence
  PCR primer
aaatataggtgtttctgtcaactccag

SEQ ID NO: 139 - DNA, 45 bp, Artificial sequence
  Primer extension primer
agagcgagtgacgcatactatctgctcttgtcccattggtgagaa

SEQ ID NO: 140 - DNA, 20 bp, Artificial sequence
  PCR primer
tcctgagaaatcagcctctg

SEQ ID NO: 141 - DNA, 22 bp, Artificial sequence
  PCR primer
agtcccaggtgtaggagaggtc

SEQ ID NO: 142 - DNA, 45 bp, Artificial sequence
  Primer extension primer
gtgattctgtacgtgtcgcccctttgccctccagctccatgaccc

SEQ ID NO: 143 - DNA, 18 bp, Artificial sequence
  PCR primer
gcccctcagacaccgttg

SEQ ID NO: 144 - DNA, 30 bp, Artificial sequence
  PCR primer
attattcatttctgtttggtctactctctg

SEQ ID NO: 145 - DNA, 21 bp, Artificial sequence
  Primer extension primer
cctcagacaccgttgatatac

SEQ ID NO: 146 - DNA, 21 bp, Artificial sequence
  Primer extension primer
gtgtaggcactttctgtttcc

SEQ ID NO: 147 - DNA, 45 bp, Artificial sequence
  Primer extension primer
ggatggcgttccgtcctatttaccttattgtctgaagagagctaa

SEQ ID NO: 148 - DNA, 26 bp, Artificial sequence
  PCR primer
tccaaaarcaaatgtgttatctttca

SEQ ID NO: 149 - DNA, 27 bp, Artificial sequence
  PCR primer
agggtgctgtacaataagatcaatatc

SEQ ID NO: 150 - DNA, 45 bp, Artificial sequence
  Primer extension primer
ggctatgattcgcaatgcttttggacttggaaactttcatttgta

SEQ ID NO: 151 - DNA, 18 bp, Artificial sequence
  PCR primer
atcgccgtggaccgctac

SEQ ID NO: 152 - DNA, 19 bp, Artificial sequence
  PCR primer
gggtcacgrtgctgtggta

SEQ ID NO: 153 - DNA, 45 bp, Artificial sequence
  Primer extension primer
acgcacgtccacggtgatttctacatctccatcttctacgcactg

SEQ ID NO: 154 - DNA, 24 bp, Artificial sequence
  PCR primer
tacatctccatcttctacgcactg

SEQ ID NO: 155 - DNA, 21 bp, Artificial sequence
  PCR primer
gatgaagagcgtgctgaagac

SEQ ID NO: 156 - DNA, 45 bp, Artificial sequence
  Primer extension primer
cgtgccgctcgtgatagaatctaccacagcatcgtgaccctgccg

SEQ ID NO: 157 - DNA, 18 bp, Artificial sequence
  PCR primer
catgctgggttcccttgc

SEQ ID NO: 158 - DNA, 20 bp, Artificial sequence
  PCR primer
cactgagtggtaagccaggg

SEQ ID NO: 159 - DNA, 45 bp, Artificial sequence
  Primer extension primer
agggtctctacgctgacgatcactggcagcactggctgtgattgg

SEQ ID NO: 160 - DNA, 21 bp, Artificial sequence
  PCR primer
aaggggccacttacctcttca

SEQ ID NO: 161 - DNA, 20 bp, Artificial sequence
  PCR primer
ggcagagttgttgaaaggcc

SEQ ID NO: 162 - DNA, 45 bp, Artificial sequence
  Primer extension primer
gacctgggtgtcgatacctaacttaatttattagccttattctgt

SEQ ID NO: 163 - DNA, 28 bp, Artificial sequence
  PCR primer
atcaactcatatagagtgactatgatgg

SEQ ID NO: 164 - DNA, 22 bp, Artificial sequence
  PCR primer
cctgcttggagagagagattca

SEQ ID NO: 165 - DNA, 45 bp, Artificial sequence
  Primer extension primer
ggctatgattcgcaatgcttgaggatcaagatttcgggaagaaaa

SEQ ID NO: 166 - DNA, 28 bp, Artificial sequence
  PCR primer
ttagtcctaatgcagtatttatgtaacc

SEQ ID NO: 167 - DNA, 19 bp, Artificial sequence
  PCR primer
tctcagcgaacatgcttgt

SEQ ID NO: 168 - DNA, 45 bp, Artificial sequence
  Primer extension primer
cgtgccgctcgtgatagaataactttcgcgtattttgcctcaccc

SEQ ID NO: 169 - DNA, 45 bp, Artificial sequence
  Primer extension primer
agcgatctgcgagaccgtataactttcgcgtattttgcctcaccc

SEQ ID NO: 170 - DNA, 20 bp, Artificial sequence
  PCR primer
cggtaatttcctgtgcttct

SEQ ID NO: 171 - DNA, 21 bp, Artificial sequence
  PCR primer
aacttacatcgccaatcacag

SEQ ID NO: 172 - DNA, 45 bp, Artificial sequence
  Primer extension primer
agagcgagtgacgcatactatccagatcgtgcacagaactctggc

SEQ ID NO: 173 - DNA, 24 bp, Artificial sequence
  PCR primer
tttcttctaatggcattgcatttt

SEQ ID NO: 174 - DNA, 33 bp, Artificial sequence
  PCR primer
ctaatagactaatataacccaaacagaagtcct

SEQ ID NO: 175 - DNA, 45 bp, Artificial sequence
  Primer extension primer
gtgattctgtacgtgtcgccgaatagaccagacacctagacttta

SEQ ID NO: 176 - DNA, 26 bp, Artificial sequence
  PCR primer
aaacatctttatagagcctttccctg

SEQ ID NO: 177 - DNA, 18 bp, Artificial sequence
  PCR primer
gccttcagggccaggagc

SEQ ID NO: 178 - DNA, 45 bp, Artificial sequence
  Primer extension primer
acgcacgtccacggtgattttgcacgttgcagggcccgccctctg

SEQ ID NO: 179 - DNA, 26 bp, Artificial sequence
  PCR primer
aaacatctttatagagcctttccctg

SEQ ID NO: 180 - DNA, 18 bp, Artificial sequence
  PCR primer
gccttcagggccaggagc

SEQ ID NO: 181 - DNA, 45 bp, Artificial sequence; identical to SEQ ID NO: 178
  Primer extension primer

SEQ ID NO: 182 - DNA, 23 bp, Artificial sequence
  PCR primer
ctcttggaacaagtgaaaaatga

SEQ ID NO: 183 - DNA, 25 bp, Artificial sequence
  PCR primer
tgctcttaggatgttttcagattga

SEQ ID NO: 184 - DNA, 45 bp, Artificial sequence
  Primer extension primer
ggctatgattcgcaatgctttcatttccatttggttcttttttct

SEQ ID NO: 185 - DNA, 21 bp, Artificial sequence
  PCR primer
tcagaaggttgtgcagagtaa

SEQ ID NO: 186 - DNA, 19 bp, Artificial sequence
  PCR primer
aacactgtcaggcatttgg

SEQ ID NO: 187 - DNA, 45 bp, Artificial sequence
  Primer extension primer
acgcacgtccacggtgattttgagctgtggtttctctcttacagc

SEQ ID NO: 188 - DNA, 27 bp, Artificial sequence
  PCR primer
taatacrtgatatttaggtgacgcaca

SEQ ID NO: 189 - DNA, 26 bp, Artificial sequence
  PCR primer
gtgttgtttctttggtccttaaactc

SEQ ID NO: 190 - DNA, 45 bp, Artificial sequence
  Primer extension primer
ggatggcgttccgtcctatttaaactcggctgtgtaccccctgca

SEQ ID NO: 191 - DNA, 45 bp, Artificial sequence
  Primer extension primer
cgtgccgctcgtgatagaatcattttatctaaccctcactgagct

SEQ ID NO: 192 - DNA, 19 bp, Artificial sequence
  PCR primer
atgctcctcttcacgcctg

SEQ ID NO: 193 - DNA, 22 bp, Artificial sequence
  PCR primer
cttttcatgcacctgagaatgg

SEQ ID NO: 194 - DNA, 45 bp, Artificial sequence
  Primer extension primer
agatagagtcgatgccagctgtacgcaaagcacctctgccgtggg

SEQ ID NO: 195 - DNA, 18 bp, Artificial sequence
  PCR primer
tgcctggctccaggttcc

SEQ ID NO: 196 - DNA, 19 bp, Artificial sequence
  PCR primer
cagacacgagctggactgg

SEQ ID NO: 197 - DNA, 45 bp, Artificial sequence
  Primer extension primer
cgactgtaggtgcgtaactcctcaggtgcatgaaaaggtgggggc

SEQ ID NO: 198 - DNA, 45 bp, Artificial sequence
  Primer extension primer
agggtctctacgctgacgatctcaggtgcatgaaaaggtgggggc

SEQ ID NO: 199 - DNA, 25 bp, Artificial sequence
  PCR primer
gttttaatatggtgtcctgctaaaa

SEQ ID NO: 200 - DNA, 25 bp, Artificial sequence
  PCR primer
tttacagcacaataatcgaaaaatc

SEQ ID NO: 201 - DNA, 45 bp, Artificial sequence
  Primer extension primer
agcgatctgcgagaccgtatttatccttgtcttcttcttttcccc

SEQ ID NO: 202 - DNA, 45 bp, Artificial sequence
  Primer extension primer
gcggtaggttcccgacatatttatccttgtcttcttcttttcccc

SEQ ID NO: 203 - DNA, 26 bp, Artificial sequence
  PCR primer
tattgagtagctcacaaaatcatgga

SEQ ID NO: 204 - DNA, 22 bp, Artificial sequence
  PCR primer
tgccctgtgttctatagcatgg

SEQ ID NO: 205 - DNA, 45 bp, Artificial sequence
  Primer extension primer
gcggtaggttcccgacatataaacaggtgagaataagcaagaagg

SEQ ID NO: 206 - DNA, 27 bp, Artificial sequence
  PCR primer
gaaaaaaaaaggttttgagacatgact

SEQ ID NO: 207 - DNA, 25 bp, Artificial sequence
  PCR primer
ggtcccagtatttcaggtgaataaa

SEQ ID NO: 208 - DNA, 45 bp, Artificial sequence
  Primer extension primer
ggctatgattcgcaatgcttgactgtaaggtgacctgggaaattc

SEQ ID NO: 209 - DNA, 45 bp, Artificial sequence
  Primer extension primer
agcgatctgcgagaccgtatgactgtaaggtgacctgggaaattc

SEQ ID NO: 210 - DNA, 20 bp, Artificial sequence
  PCR primer
atgaatggctgaggagatac

SEQ ID NO: 211 - DNA, 27 bp, Artificial sequence
  PCR primer
aactgataactatgccatctaaacaat

SEQ ID NO: 212 - DNA, 45 bp, Artificial sequence
  Primer extension primer
agggtctctacgctgacgataatcygcccagctgagcatgcaaaa

SEQ ID NO: 213 - DNA, 21 bp, Artificial sequence
  PCR primer
actcacccatgtactgcttca

SEQ ID NO: 214 - DNA, 20 bp, Artificial sequence
  PCR primer
tcaatgacattgtccagctg

SEQ ID NO: 215 - DNA, 45 bp, Artificial sequence
  Primer extension primer
cgtgccgctcgtgatagaatggasctgctggtgagcgggassaac

SEQ ID NO: 216 - DNA, 22 bp, Artificial sequence
  PCR primer
tgtgcctgctctatgtctgtgt

SEQ ID NO: 217 - DNA, 23 bp, Artificial sequence
  PCR primer
ggtgcacacacagagacatacag

SEQ ID NO: 218 - DNA, 45 bp, Artificial sequence
  Primer extension primer
acgcacgtccacggtgattttgcaccagtgtgaactgtgtaggtt

SEQ ID NO: 219 - DNA, 45 bp, Artificial sequence
  Primer extension primer
agcgatctgcgagaccgtattgcaccagtgtgaactgtgtaggtt

SEQ ID NO: 220 - DNA, 21 bp, Artificial sequence
  PCR primer
cctcagacaccgttgatatac

SEQ ID NO: 221 - DNA, 21 bp, Artificial sequence
  PCR primer
gtgtaggcactttctgtttcc

SEQ ID NO: 222 - DNA, 21 bp, Artificial sequence
  Primer extension primer
cctcagacaccgttgatatac

SEQ ID NO: 223 - DNA, 21 bp, Artificial sequence
  Primer extension primer
gtgtaggcactttctgtttcc

SEQ ID NO: 224 - DNA, 45 bp, Artificial sequence
  Primer extension primer
acgcacgtccacggtgatttcacctagaatgttcaaggtactcta

SEQ ID NO: 225 - DNA, 419276 bp, Homo sapiens
  misc_feature (67333)..(67333): marker 712056 n = t or c
  misc_feature (75403)..(75403): marker 712057 n = g or t
  misc_feature (84355)..(84355): marker 217452 n = t or c
  misc_feature (108516)..(108516): n = a or aca
  misc_feature (108549)..(108549): n = g or gg
  misc_feature (108632)..(108632): marker 217455 n = g or a
  misc_feature (108680)..(108680): marker 71206 n = t or c
  misc_feature (108681)..(108720): deletion variant; nt. 108681-108720 deleted in variant
  misc_feature (108763)..(108763): n = g or gc
  misc_feature (113047)..(113047): marker 886994 n = a or c
  misc_feature (114086)..(114086): marker 217456 n = g or a
  misc_feature (114220)..(114220): marker 88689 n = g or a
  misc_feature (114307)..(114307): marker 886896 n = g or a
  misc_feature (132483)..(132483): marker 217458 n = t or c
  misc_feature (141832)..(141832): marker 886894 n = t or c
  misc_feature (144364)..(144364): marker 712058 n = g or a
  misc_feature (147364)..(147364): marker 712064 n = g or a
  misc_feature (147516)..(147516): marker 886892 n = g or c
  misc_feature (193050)..(193050): marker 712054 n = g or a
  misc_feature (210654)..(210654): marker 712060 n = g or a
  misc_feature (418566)..(418566): marker 712052 n = g or a
gagaaagatctgcaagtgcgcaggtaaagtgcacgtgctccgcggtcgggaggaaggaggcgaggagccagactagcctgggaacaggcagggagggtttacacagccccggctgagtcgcggcttaggaagcaaggcaagttcccctaaaggttagtgtgcacagacgggtgcgacggagccgacctagcgcggctgagtccgcctgggcctgcagcagctgccccctgagcaccccctccggctctctgccaggcgacccaggaaaaagtcgccccctggtgggccatgaggtcatgggtggggggagtttggaaaggttcagacagcaaatgttccacttgaactccagggcagcatctggcactgcggggcctcctagccatgagccgtggtcaggcgtttccttagaatggaatgcactggagtgaaaacactaaatccctcaaagctgcttctctttactgtggtcacacacagtgaaatcaatgggcattagtgcagctagctcttttcaaggacacaatgttaagcacaggaagcctggtatgtggacgctctgggtttgcagaaccaggcaggggccaggggctcaggacaagtgcccggtgctcccttcccattgggcgaatcagagcctggggcccggcggtgaagctccccaggtgactctaatgtgcagtgcactttgaggagcactacttagaccaatgtgacagtctacaatgtgtagatttagggtgagtgattctgaggaaaagaaacccgaggctgttagcagttgtgggcagctgctgtctacctaaaccagctgcggtttgcttgcttggtgagcctgagcttcgcggggcgggcatggcatctgccatccaggaccctgggacggggcctgccagggcaaggagctgagcattgaacgcatctggggataactatctctcatagaagaactaatgaggattgaacctgaacacagagatgaaagagctgagtagactgcaaagaattgcacaaaaactgcttgttctgcaaatttagtttacaacaatttgagtgcagttcacattggtgtaatgtgatttaggatcataagtccctaaagtttcattacactgatgaaaagcaaatgcctatactgttcttgttttatgagaagaacgcaacctccagcccctggagcagctgagatctgaggatatcaggaataccaggaatggggaggtcctggctgtccctggaaacccagcggcatgacacctgtgtcacctgggtccccgtttctatgctggagtggcaggcagcaaggaaatattttgagtttgaggccatatgcattttggaaagatcactgtggctggggggttgggagcagctggggagttgaagaaagccactgccaaggccttcccactgagtgtggttgccaggccggggcagggaagcactggtgagctgcaggggggattcccagttggtgatgggtgatggatggtgggatcagtgggcccctgggaaaggccaggtgtggcttcagcactctgggagttttgggtacctttatgtctagggacacaaagaggtagatggacacagtggtttgagctgcagaagagagttgggcggccacctgtccacaggtgaggatgaggtttcttgggagagtagagagaaaggggaggcttttaactgttagtagtggaaagatggcttgcaatggagataaaggctaccacagaggggaggaaagcccagagcctggaggccagggggcaggatctggggcaggggctgacccagtgtggcattctccatatgctggaaatgtgagaagagactccacaagccggagctccctcagctccttggggccgctggctctaccagctcactcgctggttgttgggtttccgcagtttccatttggggttctgtcactgacctgcaggcagccggcttgtcgcgggctgtggctcttgcgccggccacccgcgggacccgcgcagtttcggcggagcgcggcggggtccgtgtgggtccgacccgtggggaggtgtggctggcgcgcctgtgctctcggcccggccacccactgaggcgccaggaggcgcattccgcagggcggcggggagcaggtccggtgtttcgaggagcatgggacacagtttccaagctggcctgcaggatgggcgaagggacaccgaactacagcggcacagcgccgggccaaactgcccgcagctggggtagcagaggaggcttgcggcagcggcgccgcggggaggggtcctggccccgggctgggagcggggctgggcggccgcgtgcccggctgcgcgtttgctggcgctgctcgtttctccccgagaggtgcgcctggcctgccgcggggccgccagtcccggggggccctgcgaacgcggccctcggcagagcccacccgcggcctcccgaggccctctcccgggccccgcccctcctcccaggctggaaggaggcgtactctttcaaacaagaacagaaaacggatggaaagccacgatgtttggcttaacgttctagaagcttttaaccaagttcacatgttgaaaaatccacctgaagggatatacggtcacactcgcggtctcggtccaggcccgaagtggggtgggggcaccgcaccctacactgccctcagcgggacacccctgtctcagcccaggaccggctgaggaggaggctgacccctggacgggcttcttcaggccttcttggccgcagggcttctcctgccccctccctgggatccgggaactagaaggaatgcttcaaatgcaacggtcacagcatcgctcctgcggacaccgccaggctcccgagacacggctacgcctccggctcacagtcacgcccgacacagacagaccacctccaacgaaaagccacgcccccggagacacgaccacacctcggagacaggccatgcccccggagacactaccaagccccagagacacgaccacgccccaggagacacaaccacgccccggagacaagccatgcccccagagacacggccacgccttggagacaagccacgcccccgagaccagccacctcccggagacacgaccacgccccggagacaagctacgcccccggagacacattgacgcctttgcagacgcagccaggcccccggagagaagggccgtgctccgagagacacagccatgccctgtggacccagccaggcccctgcaagcatagccaggggcggtttctcgctcagagggacgccttggggctgagcagcgcattagggacgatttggggccaagcagcgctttgtggggaggggagcgttcagtgacgggtgttttctctggatgttagacactgtccaccagaggggagttggctgcagagggactgcctttcaacagccaaattttcacctcagcgcctaaacctggtgcttctcgttccttgccggtattatgtcagatatttaaagaactcgaagaacaatgttcttttttttttttttttgagacagtttcgttcttgttgtccaggctggagtgcaatggcgccatctcggctcaccgtcacctccacctccctggttcaagcggttctcctgcctcagcctcccgagtagctgggattacaggcacgcgccaccacgcccggctaatttttgtatttttagtagagacggggtttctccatgttggtcagcctggtcacgaactcctgacctcaagtgatccgtccgccttggtctttcaaattgctgggattacaggtgtgagccaccgcgcccggccacaatgttcttaagatttacgaagaagctgttttccacacgctgttgatcgccgccactgtgaagtcggcgtgcggcgcctgctgccggctgtcgtttcacaggggcggggtgggagggccgcggtcccccgggcgcacccgggcggggagtgcgcagggcggcctggctgggccactcctgccctcccgccgggcgccaaccggggatccgccagctcgagctctgctccgagtcccgcagacccaccatgcccggagcactcagccgtgcggccacgggcgtgccagtaccagcgggaaaggccggggctgcctggacctgggcaggaggcggtgacccggcctagcttgagcgccggcagcaccgctctcttggctgctgctcattcacacccgcaggcctggagccttttcttgggccgagcaggtgacccaggctcctgtacgcagtggagaagggcccaggcgtggaacgccgtccccttcccggcagggcaggtgtcaggaccacgcccggcgccgcgccctggcctctgtcggtcctggcaccggtgccgtcgccccactccgccctgggcacggctgcgggaggcggggctcgggcaggcttggtgagcgtctggcgcgctctgaaggccacggcacggcggggcgttgagggcctcggagagaacggtgctggcagcaggggcggcaggaggggcccgggcccacccccacctcgcagggcccgagttcgggggcacggttgcaggcagaaagagcgcagagccggagagagggccggcagtagcccacacgaacgatttggggttgagtgtgaggactggaaggttccaccgactctgaaccatctattttttttttctaaaaataagccacaactatctattttttctttctaaaatttggtgacttcggtgtgagtcttgcttggaaggagggtcctgggcgccatcgcggggaggacctggaggggtgggttggggctgtggcatactccgccctgtgccgccggcttacagctcccctacccctctcccgccagctgcaggtgtccctacgggcgggagctctgcccagggtggccctgccctaggcaagtcaagcgcatggggcccaataaagcaaagccaggctgaagctgtggttcccgtgagagtgcagccacgggctggggtgaagggagggtcaccccagaggacgggctgtgtgctagtgtgttggggtcccccagaggtaggctgtgtgctagggtgttggggtcccctaggagacaggctgtgtgctagggtgttggggtcccctaagggacaggctgtgggattggagtgctccatcatctgcatgagaggcgatgaccaggtgggactaggaggagttaggatgtgtttggaagaactggatgaggaatgtgtgagaaagagggagagttctgggtgagcagaggcctctgtctcccagggaagaggcaggaagtgaggtggaacgagagcccctactcaaccccggacaaccactaacctgttccccattgatataactttgccgtttcaagaatgttgtagtcatggaatcagagtaaatagtctgttggaacttgctttttttcactgaggattttcactctggattcctctacgttgctgtgtatgaattgtctgttccttttgattgtggcgtggtcttcccggcatgcatgcaccgcagcctatttcacactcccctacggacagacggctgcgtggcttccaatttttcatatagcttctatgaccatttgcgtgtagggttttgtgtgaatgaaagtttcatttctctgggattaatgtccaggagtgcaattgttggctggtagttgcaattttagtttttttttaaaaactgtcaaactgctttccagagtggctgtacaattttacattcccattggtgatgcaggagtgaaccaccctctcgagtcctaggcagctggcggtgttgtctctgttttcttttttctttctttctttttttttttttgagacggtgttttgctcttgtcgcccaggctggagtgcagtggctcactgcaacttccacctcctggtttcaagtgattctcctgcctcagtctcctcggtagctgggattacaggcgcccgccaccacacctggctaatttttgtatttttagtagaggcgaggttacaccatgttggtcaggctggtttcgaactcctgacctcaggtgatctgcctgcctcggcttccaggtgtgagccactgcgcctggcctgttttctatctcagcctttctgataggtgtgcagtgatagctcatagttttaatttgcatttccctaatggctcacgatcttgaatgtcttctcacgtgcttagttgccgtgtgcatatcctccttagtgaaatctttgcccattttacttttttttttgtttacttttgaattttgaaaattgtttaggagtggtgagagggaacattcttgccttgtcttcctgagaaagcttcaggtttctcaccattaggcgtaatgttagctctatgtcttttgcagatgttctttaataggtctgaggaagttcctctctattcctagttttcttagagtttttgttttatcatgcataggtgttggattttgttaaatgctttttctgcatcaattgatatcaccatgtgatttttcttctttagcttttaatatggtagattacattgcttgatatttttcacagttctattgagattataattaaataccatataattcacccatttaaagtgtacaaattcatacctgtaatcccaggactttgggaggctaaggtgagaggatcacttgatcccaggagtttgagaccagactgggcaccatagtaagaccccatctctactaaaaataaaaaattagctgagtgtggtggtgtgtgcctgtggtcccagctacttgggggctgaggtgggaggatcactgagcctgggaggacaagactgcagtgaggcgtgattgcaccactgcactccagcctggtttacagagagagaccctgtttcaaaaaaaatgtacaatttaatgttttttttcagtatattcactgagttgtgtgaccatcaccatgatcaattttagagcatttttattaacccaagtgaaactccacattcattagcatttgttcttcatttccctccaaccctatcccctcccctagccataagcagcaactaatttattttattttatttccctatggatttacctgttctgaagattttatatatacatggagtcaggcaatatgtggccttttgtgactagcttctttcactgagcatgtttccaaaggttattcatgttttagcatgtgtcagacaccattcatttttattgtcaaataatccactgtgtgtatataccacattttatttatttagtaatggacatttgggttgtttgtacttttgtttttttgagatggagtcttgctctgtcacccagactggaatgcagtggcacgatctcagctcactccaacctccgcctcctggatttaaatgattctcctgcttcagcctcccaagtagctggggttacaggtgcccatcaccatgcctggctaatttctgtatttttagtagagacgaggtttcgccgtgttggccaggctggtctcaaactcctgacctcaagtgatcctcctgcctcagcctcccaaagtgctgggattacagatgtgagccaccgtgcagggccgggtgctttccacttttagggtattatgactaatgatcctattaatgttattgtacacatttttgtgtggacatatgttttcatttctcatgggcatattcctacaagtggaattgctaggtcatatggtagctccatgttcaacattgattgatttttgaacattgaaccagccttgcattcctggaacaaaccctacttagttatgtgtgtagctcttttgatatattactgaattccctttgctaatattttgttaaagatttttgcaccatattcataagagatattggcctgtagtattttttctttgtactgtatctgattttggtatcagggtaatattgtcttcataaaactcactgatgaggtatacctcattttctattttctggaagagattgtatagaattggtgttaaatgtttggtagaattctctagtgaaaccatctgaccctagagatttcttctgtaaaaattcaaatttaatttacttaatagaaattacagagctattgacattacccattttatattgggtgagttatagtaatttgtgctttttgaggaatcactaagttttccaagttatgtatgtaaagttgtaaaatggcaatctgatataccactattattctttgatgtcttcagggtctgtaatggtatttcctgtttcactcctgacattaataactgtcattctgttttttttctttgccagtcttgctagaggattgttaattccattgatattttcaaagaagtagctcttggtttcattgatttttttctactgtttttgttgatttgttttctatttcactgatttttaatctcagcttcattatttctcatttctgcttgctttgggtttattttcctcttctttttctaggttcttgagatgagagcttatattatttttgagacttgctctccttttgataccagcatttatgctgtaaatttcctcccatcactgatttagctgtgttctgtcaattttgatatgttatattttcactttcattcagttcaatataattctgatttcccttgagactttctttttgaatcctggattatttggaagtatgtttaatttctaagtgtgcagattttcctcctctctttttgttacttatttctgattcgattgcattgtggctacagaatactctgtgtgatttcaattcttttaaatttgttgaggtttggtttatggtccaaagtgtagtctatcttggtgtatgttctgtaggcactttgtaagaatattctgctgttgttggatggagtgttccataaatattgattatattctattggttgatggtgttgttcagttcttctataactgcactgattttctgtctagttctattaattgctgagagataaatgtttaagtctctaactataaaactatactataaatgtgtctttctccttttagttctattagtttttgtgttagatattttgcagctctgttgttttgtgcatatgtgtttaggatttctatgtcttcttggtaaagtgacctttttatcactacaagatgtctctctctgtgcctggtaattttctttgccttgaagtttagcatatattacgtgaatataaccgctcctactttctttggattgatgcttgaatgatatatctttttccatccttttacttgcaccctacctatattgttatttaattttatttttcaacttttattttagatttggggctacatgtgcaggttgttacaaaggcatgttgtgtgacactgaggtttggtgtaccactgaacctgtcacccaggtagtgagcacagtcctcaataagtagtttttcaagccttgacctccaccctctttccctgctccagtagtccccagtgtctgttgttcccatctttatgtccatgtgaacccatatactgttattttagaagtaaatttcttatagaccttgcatagttgagtcatatttttaaattcactctgccaatccgtcttttagttgatgtattcagaccatttacatgtaatgcatttttttctgatatgttagggctatgggtaaattgaacattttttttagaattccattttgatttgttgttgcgggaagtcagggaccccgaatggagggaccagctgaagccatggtagaagaacataaattgtgaagatttcatggacatttattagttccccaaattaatacttttataatttcttacacctgtctttactgcaatctctttacataaattgtgaagatttcatggacacttatcacttccccagtcaatacccttgtgatttcctatgcctgtctttaatctcttaatctcatcatctttgtaagctgaggatgaatgtcacctcaggaccctgtgatgattgcgttaactgcccaaattgtttaaacaatatgaaatctgggcaccttgaaaaaagaacaggataacagcaatgttcagggagcaaaggagataaccttaaagtctggtggcctgtgggccgggaggaacagagccatatttctcttctttcaaaagcaaataggagaaatatcgctgaattctttttctcagcaaggaacatccctgagaaagagaatgtgtccctaaggggaggcctctggaatggccactttggggacgtctgtcttttacggttgtcgatgagggatgaaataagccctggtctcccgtagtgctcccaggcttattaggatgaggaaattcccacctaataaattttggtcagaccgattgtctgctctcaaaccctgtctcctgattaagatgtcatcaaagacaacatgtgcctgaaacttcattagcaattttaattttgccctggtcctgtgatctcgccctgcctccatttcccttgtgatattttattaccttgtgaagcatgtgatctctgtgacccacaccctattcatgtactccctccccttttgaaaatcactaataaaaacttgctggttttacggctcagggggcatcacggaacctaccgacatgtgatgtctcccctggatgcccagctttaaaatttctctcttttgtactatttccctttatttctcagaccagccgacacttagggaaaatagaaaagaacctacatgaaatatcgggggtgaatttcccccgataatttatccataatgtttcttggtgtatctcttttaaagtcattgttctaggtattaaagtatatatacatgttacttgtcacagtctactgatgccatcattttatcagtttgagtaaaatcaagaaaacgtacctccttttacatcctttacctctctcatttgttatagaattgtcttgatgattccctctgcatacattaataaacacatcaaggagtgttaaaatttttgcttcaaacattcaacagaatttaggaaaatcaagaggagagggaaaacatatttacctacgtataaatgttattcaatagcatgctatcaacagtagatgacagaattatttccattaagcacttgcattctctgaatgaaaacagcacatgatgcatctgttaagaatcttgcttggacttacctttttttttttcctttgagatgcaggttcgctttcgctgcccaggctggagtgcaatggtgcagtctcagctcactgcaacctctgccttctgggttcaaatgattatcctgcctcagcctcccaagtagctaggattacaggtgtctgccaccacgcctggctattttttgtattttcaatagagatggggtttcactatgttggctaggctggtggcaaactcctgacctcaggtgatccacccacctcggcctcccaaagtgctgggattacaggttgtgagccaccgtgcccagcctggacttactttttattttattattattttttgagatagggtctcactctgtcacccaggcttgagtgcagtggcacaatcctgactcactgaagcctcgactttcctggctcaggtgattctcctacctcagcctcctgagtagctgggactataggcatgcaccaccatgcctggctaagtttttgtgtttttaatagagatgggattttgccatgttgcccaggctggtctcaaactcctgggctcaatgaatctgcctgccttggcttcccagagtgccaggattataggcgtgaaccaccatgcctctccttacctatattcttttaccttcctgatgttctaaaatgtattctttcattttccctttctatttagagaacttcctgtagccattctttcagggtaggtctgctggcaataaatttttagttttctttgaaaacatcttgatttttctttcactggatataggcttctggcttgactgttccttcctctcattacttggaaaatgttatgtcattttcttctggccaccatggtttctgtcatctgaattgttttttccctgtagggacattttaatttctctctttaagactttttctttgcttttaatttttaaaattttgcccactatatatgttggtgtggatttctttgggattatcttgtttggggtttgctcagcttctcaaatctgtaggtttatgtcttttgccacatttaggaagttttcagccatgagatcgtcaaatactttttaagctacatactcttcatcatcttcttctggcatttggattatatgaaagttaggtcttttgttatggtcccataggtctctgaggttctgataaattgttttagactatatttctctattgttcaggttgagtaatttctattgttctatcttccacttattgattcttttctctgtcccctccattttactgttgagttcatttttgcattttgaattttgctattgtgttttcagtttcatttgagtcttatttgctgagactttctgtgtttcatttgtttcaaatgtgtttatttctctttgaaacatttttattttggctgatttaaaaatattttttcagataattctaacatctccatcatcttggtgtcatcatctattttctttcaagttgagattttcctggttatcactatgacaggtggttttgagtgaaacctgcatattttgagtattgctttataagactctaatcaccacttaaaccttctgtttaggtgccttcctttgacaccacgccagcagaagggcctgacactgtctcattgctgccagatagggttagaagttcaggttccccaagatggggaaggattccaccttattgctgggtggttgtgggacctctgcctctcgctaggactctgctgatatcaccctggctgagtggggtgggacacctcattactgctcattactgacctctagtgacaccactggggagtggcctcattactgctgagcagaagtgaatgccctgactctccatttggcctcctctgacaccctgtcagcaaggaaggagaggggtcccttttctgcagggcagggatgaagtccagcctcctcacatggtggtccccacttaagccattgggggaggagtgtgtagggaggaggtggaactccctagcactcagcaacggtgaatgtccaaactccctactcagccttttgcgaagcatccctgtgaggactgggggccaggcactgtgtaatagcctttggagggtgcccactcagcctttgctctcctgagtggatgtgggtctgcagtattaggctgcagtagaacagatattgtctaaaagctttctgtcttgctaggctactcatttcctggtcctttggctgggggcaggcttctttggggctttttgttctaaacatcaggtttttagttgtacttagcaggaagaacagggaaaagtaggtcttctctgtcttcctgaaggcaccagtcctgagctgtatatttttagtgttggcagataggacagtatgtttgcatgccagcttgtgaggtttgggatggggaggaatgcaacagtgcagtctgggcgggggtgggagcaggtgggctccactgtacctggcagggctgtagacaagtgtgtccttgagaggctgggcttttattctcattgcttctagttttgccagcacagccattctgggacgttttgctcttggagacattcctcactcttgccctactgtgttctgaatcccagtgtctgactccagcttgggctctggcttgagttcagccaataggagactcttctagaagattaggggagggaggatgccccactcttctttggggcatctcttctggggctccagctccttctagaagttctcagagtagcttctatttccttcttggaccccggctgattcaggcagtgaagggagcaagaggcagaggcagcagctgggagtgaaagggggaagggtgtgtggggtttaagtggggagtgaaggagagcaggcgcgtacactgtctggggaggtgcggtgggattgctgggcagtactggggcccacctggggttcctaatatgatgtcatctgcaggcataggcagcaaggaaggttttctacagccatgttcagctgctgagcagggttgggatttggccacaggtggcagactctaggggcccatggtccccacctcctggtgttcacaccctggtttagtcccctccctttgagtgtaggcaggcaggacccaggactgacctccagctgacagaatacagcaaagtggtggatgtccccctgacacgtaatagcctataaaactctgcctcactgctgctcgctctccagatgctccttgttgcctgaaaaggcaagccaacatactggaggagcccacatggtgaggatgcaggagcctgttggggtgaagggggcctctgagggggcctcctgtaacaaaacaccataaacttcttgctggcccacagccagcaagaagctgcagccctgagtcatgcagccacgaggacatggatcctgtctgcactgagtgaccttggcagcagatttttccccagttgagcttccagatgagatcacagcccagtggccccttgagatcccaagcagacaacccagttgagccaccctggccttgacccacagaaactctgagattatacacgtgtgtgctttttaacaggtacactttgtggtgatttgttttgcagcaataaaaaactcgtttatcaggtaagtttgagagaatgagttggggcaagtaagaggagggtgtttgctggaccagagaggctccactgggaaagaggggagtgaggtcttggagaagggacatggcctgaaagagaatggacatttgttgcactaagggtgggtggtatgttcctgtgtgagtccattcatgctgctgtaacaaaacatcataaactgatgacttatgccacaaacataatttctcacagtttgggaggctgtgaagtctcagatcacagcaccaacagattccgtgtctggggaggcccacctcctggttcacagacagcatcttctcgccgtgtccacacatggtggagagaggagctgagctctcccacgactctcagaagggtctggagctgattcatgagagctctaccctcagggcctctccaaatcccagtcacctccctgagaccccacctctgaataccatcccattacagggcagggtttcagcctctgagtttgttggagggcacatacacattcagtctgtggcaattccaatggcatgttcttctaaagaagctgggtgttttaggaggggcaatggcgccctggaattgtcaatggagagcaggaggaccccctctaaagtctcagcaggaccagttacataatttgtgaggccctttgttcaaaaaccagggaaaatgccattaatggtaaggataaagttttctcctttcttccatagtctctctctcttggcttgtcatggtgcttttaaattggtatttaatgtcattattctaaataaaaaaatttaaattttaaattgttagcattacttttactagtcatctttatatcatgccacatcagtttcaaatgcaaatattgaaacatttagctcatgcgtggaatttgtgaaatcagacaacttttttatagctggtatgtacatttgtactttgttcttaccaggtagtggagccactgtctaaaaccaatgcaactgttttatctcacttttatgatacaagaacattctgccgacatggcctgccttcggctcactggtttgtgagtgatcactctcagcataagtggttggttaaagcagggaaataacaatggtgagaaggatatatggacttccttggtcgttcaggtttcttcgaatgtcatgtttttctatatttgaagtaagttctggctccaccaggaagtgtgcgtctggggctgtcagtgcttggcttactcagctgtagccatcacacgtcttgtacttgctttgagtcacagcaaactcctttcatcctgggtccactggaattctgtgctcatggggcattgtgaagactgtatgtgaaacaggcgattaggagtggtgatacactactgtgctaactccagccccagcacgtgcctctgcatctcagcgccagacatcctgcatggccaaagtgcacagtcagtcctggcttcccagcaaccctggacagcaaaccaagtggctgcaaggccaaaggtcatttctggtgctgtcggctgcttgaaaatgcaaaaaataaaatggtgagtggtttgaaatataagccccaaagtaggacagcattactttagaggtataggaatagttcttacttttattgtaggtattattatattctcaccagaatagtattaatttgctaaatgcaaaaaatgtgaaaatcatagatcaaacaaaaccaaagaaaaaggacccccgtgggcactttcgccatccagaggtagccatgttttggagggtgtgtcttttgggcctctgttgtatgtatgtaatttatacatatttatttcaataaaaacatcacagtgtaccacttgtccttattctttacacatccatagcatttcccaataacaagaaccatctcttagatcattttaaatgtagcacagaatttcatgctgtgcacacatcacaatctacttaactagctctctgttgctgaacacttaggccactgctagggtgtccggagttggttccttctggtgggttcttgctctcactgacttcaagaatgatgctgcagaccttcccggtgagtgttacagctcttaaaggtggcacaaacccaaagagtgagcagcagcaagatttactgtgaaaaccaaaacatcgaaagtatccacagattagtaggggagtccagcgtgttggggtagccagccttttattcccttatttgtccccgcccacgtcctgctgattggtccattttacagagtgctgattggtccactgtacagagtgctgattggtccattttatagattgctgattggtgcatttacaatcctctagctagacacagagtgctgattggtgcatttacaatcctttagctagacagaaatgttctgcaagttcccactccacccaggaagtccagctggcttcacttctcactagggtgaaatgctcttgcgtggttaggatgctggaactctgggaccgcctccgaagaagcaaccttcctattgtacggactcccaaggtgcaaacgttagtctcagtgtgcctttcatgaagagtggtttctttctggctgccctagagagaagactggcagtggagcatgcatctggagggcagagacggcaggcggtaccccggcgcgccggcggtggagctcctgcagacgtccgtgcccagcggactcgctgaacttgtggccggcaagcgcaggcttcctcggggagccggtggagctgacccctcgcactcctgccccaggggggctgccgggcagagctcttgggctcctgcaggccaggagtttgcttcattcctcacaaaagggaggtgagtttaaaatagtgccatcttgtaaatgtggacttcacacagattgggtttccatgagcatcgttcccccacgtttgttgtgggaaaaatttccagaaattttgcaagaatttttccagcattagatcactttcctggcttagtttttgatgactgatatttgtaaaatatgatgaacttaatttagctccaaaagataataaaaatagaaaaaagagtttgtagcatgaagacttaacacttaatatattatttaaagtattgcaattattctgcaattttggaaagcgtatgtctctgagggcatgccttatttctatacatatagcaagtgaattaactgagtattgtttttcatgtcagaaaagtcagaatttacataaaaggaaatttaaaaataatttcaacttttattttagattcaggggttaaatgtgcaggtttgttacctgggtatattgtgtgatgctgaggtttggggtacgactgatcacccgggtagtcagcatggtacccaatagttacttttccaccatccctcctcccgcccctgtgtggtccgagtgttccctgctgccttctttatgtccatgtgcacccgggggttagcgcccacttgtcgtgagaatatgtggtatttggtttcctgttcctgggttaattcgcttggataatggcctccagctacatccatgttgctgcaaaagacatgatttcattccttaagaaaaaatttgatacatctttaaatatttacttatgtaaagacaatgaatggtttttacatgtcaatgcttatactgcaaacccataatttgcagttcacatagatgtccttgtaatgagaaaagcagcatcctatgagtaggtgtctctgactgtctttgttgggccatatcgattacatggcagatctgaggatcctcgttcccacagccagagctccgacccctgcagtactgatggtctctccagcctttaacaaagcaccacagaattgcatgcgggtgtggtgcatgctgctgctgtcatcctgcccgctccagggggagctccccagcttgcgtgctcatgctttcactgaatgtttctattgacttacagtctatgctgtccttttgcaagtggtgaaactttgagttgctctctttggcaatgtgttttgaggtttctttgtgctgatgcctgtagctctcgttcattcgtgtgaactccttgcatagaatttcattatgtgaatatgctaccattaatacatgttctcctgttggcggcttttcagtttctgctcctcatcccccagtatgtgctattaaaaacagcctgcagcaaatgttctctgttatacactgaatgtgtctgttccccccagattcatatggaatattctgagtattaactttctctggtcccatgttgcaggatcttctcccagcgaggagcttgccttttccttttctttaaagagtgttttgttgggaagtgtctaatatggccggaaggactgtgtggcctgtgcatggggaggcagatgaggcagcaggattgtcccagccaggatgtgagtgatggaaggtaatgttcagcttccagtgagacaagaattgggaaaaccagaagagcatatgttgcatatgttccaagttctttgacctcacttcttgcttcgatgtatggtgtaccaggggcagactggggcctgtcatgagctccacaggcaggaggccctgggcagccaggcaggattccaggtggaggaggaaggagagcgtggggaggtgctgacaggtgcaggcacatgggggcaggagctggcaggtgtggtggtccagtgaagggagggtgagggtgccctgaccccacagcctgcgcagggcacggggagggggtgtcgggatggcactggcaactacctaggctgagtgtggagatgccagaaggtgccacccttgtccacaggcatgagccctcatgagtgagccacacctcccatgcggagcttctcccaggaggaggagcaacagggaaccgcagcctcaaggggcagctctcagcaccatgaggagaatggtgtgttggcccaacccacccacagtgcgggctctcgggggaagggctcactggtgtgaatgtctgagtgtggagggcacaggctgttgcccacatggccctaggtgagccccctgaaacagcacactcctgggcaggtgtgtggccatgtcgcctggtggccatgtacacagtatcccagcactgtcatctcaggctaaaggttactgaagagttttattacattttgcccttcttgtttcatgaaaataggcagaaaatgaaaaaaaaaaaaacagtaatcttatcagagaaaagatacgtaagtctttgaatctaccataggtgggagtctcaggtatgtggaaaccagcaaaccccttagcctcaatgaagtcaaactcatctattatgggttcagttgtgaagagaatgagcagaacgaaagaacactatgagatgctgcaaatagattgcttcagactgcgttgaaaaggtaatttgggggactgtactggcctatgttttagctctcagggaatcatccccttgtagcctcgttttctgttgtttctgcaggagagaagcaggcagaggctgtagcctgccgtgtcccctttttcctttggctcccaggcagctcaggtgcaatttcttgggtcagttacatcacctgtgcacaaactggttactcggtattttcttaaaatgattaaaatctgtgtgaaacaaggcaggatatacatataaagaaagctggaaggaagagtgaattcaggatctattgccaggtaacaaatttctcccaaacttagcagcttaaaagagtacatatttattttctcagtttcatgggtcagaaatctgggcacagctgacctaggtcctctgctcagggtcttcacaggctgggacaagttgtcatgtatggctctaaccatagcatctcagtgttcagctggagcaaggtctgcttctgagctcatctgtgtggttgttggccgggtgtggttcttcctgggctgttggatggatggcctcagttccttgccagctgttgactggaggccatctcagctcattgccaggggcccactccatctgggcaggcacaagggatagtcttttgtgacctaatcatggagtgacaccatcccttcttctgtattctgttggttagaagccagtcactactaggtccagcccactctcagggatgggattgctggaggctgtgagtagcagcaggccaattcctgggagccactcaggcatcaccaaccccagagatgaatagtgatgaaggaaattgttgtgaaaaagttggaaatggaacacaaagatgattggtgtcttttataggaagtgaagggaagtctggagtccttccaggttatctgcatctttcactgtttgcaactgatcagaaagctgacaataatgcaaataactcttttccctagaagtaaagttggattgtgtccgtggaatgcattgtccagttttgcatttatttgtaagttcaattcaacgttgtcacccaggctggagtgcagtggtgcaatctcggctcactgcaacctctgcctcccaggttcaggcgattctccttctcagcctcccgagtagctgggactacaggcactcgccaccacatccggctaattgttgtatatttagtagagacggggtttcaccatgttggccaggatggtctcgatctcctgacctcgtgatccacctgcctcggtctccgaaagtgctgggattataggcatgagccaccgcttctggcccaattcagcatttctaattgcccatgtttgtgtggttttttgcgtcttatcagtttcttctaattgatgagttaaacaaaatattgacctgcattcattttatattgggacgtgagtcgcagttttaccctcctttaatagtagtcctataacagagggaaccaaccacaaagacatatggagaaagcagacttcattctctgggcacctcaacccttgtctttgggaccctgcgcctgctctgtatgtccagccctggaacgctgctggacattcctcagggctgtttcccctgtcctagctgaggacttccacccttttgttagaggaatacgtcttgtccatacaatcgtaatgacatggaacaaacaaaattgccaaattaaagatgaattttttaatctaatatgctaattttattcataaaaaaactaagcacagggctgggtgcggtggctcatgcctgtaatcccagcactttgggaggctgaggcaggtggatcacctgaggtcaggagttcgagaccagcctgaccaacatggagaaaccccgtctctactaaaaatacaaaattatccgggcctggtggcacatgcctataatcccagctactctggaggctcaggcaggagaattgcttgtacctggaaggctgaggttgcagtaagctgagatctcaccattgcaccgcagcctgggcaacaagtgtgaaactctgtctcaaaaaaaaaaaaaaaacaaattaagcacagagtgacacacagacttccccactctctccactctctctttcccatttgctttgcctaattaaatctcagaaaattttgaatcaattttttttgtatctcaaaatagtatgtaagaatgacagatgtacttaaatacaattggttgtcagattgacagacttaaattatctattttttttttttttttttttttgagacggagtctcgctctgtcgcccaggccggactgcggactgcagtggcgcaatctcggctcactgcaagctccgcttcccgggttcacgccattctcctgcctcagcctcccgagtagctgggactacaggcgcccgccaccgcgcccggctaattttttgtatttttagtagagacggggtttcaccttgttagccaggatggtctcgatctcctgacctcatgatccacccgcctcggcctcccaaagtgctgggattacaggtgtgagccaccgcgcccggccaaattatctattttttttaaaggcaagattgtgtgggaaggtttatttctaatcagtggaaaatgtaattaattttttctaattgttttcacaaatcaggaattaattgaccttgaaatttgccctttcaaaattagctaattaccttttggtcttccacttagcaggaatatatttgatggcagattggacagggaagcaaattagagagaatatgttaaaaataatgaagataaattatttaaggcagcgtttacatctgtcatggattggttactgtatttcattatcaagtgaaaataaatatattgctgaaaatttggaggtcgaagggagaacacaacatcgtgcctctaacacaatcattactgtctgcttgcatttatctgtgttcccttctggtctttcctatatgtaatacaagtttttacataattgtgctcagagtgtatctcttgctttgtagtttcttaaatgtaacaatatgttgtaaacactatcagtgctgttgcagattgctcaaagctattattttatgtatttttaattgaggtataatttcaccagaaatggtgagtagatctatgagttttgacaaatgcatacaattgtgtaattgtcagcaaatcaagatctggaatatttctatcaccccacaaaaactcctttggctgcttccttttcccgtcagcacttgttaaccatcaatctgttttctgtttttacattttggcctgtttcaagcatgtcaaataaatggaaccattgagtttggttcttttactttgtataatgcatttgagcttcatccaagttgtgtttctttttattgctgagtggagttgtgtggacatatcacactttgtttattcattctcctcttgaagggcacttggattgttcccaagttttggtaattatgaataaaaccagtataagcattggcatacaggtttttatgtgaatgtaaattttaatttcccttggataaatgcctaagaatgagattgctgagttatttgataaatatatgtttaactgtctaagcaaaggccaaattgctttccaaggaagctgtaccattttgcattttcaccagcaatacatgagagctccagtcctctgcgtcattgtcagcacttaatattgactgtacttttaattttagccattttaataagtatttagaggcaccttattatggttttatatatttggagagtgaggtctgcttgttttcctattatggggtttgtgattcattatatattctcaacacaacttttttttataaaatgcatttttcccaattatcttctgacagtttgtgcttgtctttgcattattattttttcatttcttttggagagcagaaatttttaattttgatgttgtccaatttatcaattattcttttatggagtatacttttggtgttgtatctaagaaatctttgcttaacccaagatcacaaagattttcttctgtttgttcttttagaagtgttgtagttttaggttttacatttaggcatataatccattttgagtgaatttttgcatatgctgctgggtttatttatattttgcttatagatgtccaattgttccaggaccgtttgttgaaaagactcctttgtccattaaattgccttgtatctttgtcaaaaatacattgtccatttatctgttgatttatttctgaactctctattcttttttgagacggagtctcgctctgtgcccagctggagtgccgtggtgttatctcggcttactgcaacctctgccttctgggttcaagcgattctcctgcctcagcctcccaagtagctgggattataggtgcccaccactgcacccagctaattttttttttttttttttttttttgagacggagtctcgctctgttgcccaggctggagtgcagtggcgtgatctcggctcactgcaagctccgcttcccgggttcacgccattctcctgcctcagcctcccgattagatgggactgcaggcgtccgccaccacgcctggctaattttttgtatttttagtagagacggggtttcaccatgttcgccaggatggtctcgatctcctgacctcgtgatccgcccgcctcggcctcccaaagtgctgggattacaggcgtgagccaccgcgcccggccattttttttgtatttttagtagagacggggtttcactatgttggccagctggtttcaaactcctgtcctcaagtgatccacccacctcggcctcccaaagtgctgggattacaggcgtgagctaccgtgcctggccccctgaaatctctattctgttccatcagtctatgtgattatcatgtcatgaatatcacactatcttgaatctttatgaagagttctgaaatcaaatggtgtgagccctctaacgtggttctttctcaagattgctttggctattcgatgccacttgccttcccatataaattctatcatcattttgttgatttatgtaacattcctgctgggatttttttttgtactgtgtgtgtgtgtgtgtgtgtgtgtgtctgtctgtcattttatcacttgggtagctttatgtaacctctactataatcaagatatagacctattccatcgtaatctcagattccgtacagaaatccctcacacaacccttaagttacatacccctccccctgccatctttaacccctggaaatcactgatctgtttttcatctctagaattttgccattttgataatgttatatacatgaaatcatacagtgtgtgtaaaaatttaaaattcaacgtttattttagatatgggggtacccatgtgcagatttgttacatgagaatattatgtgatgttgaggtttggagtatggatcccgtcacctaggtcatgagtctagtacctgataagtagttttttatttttttaacccactcccccttccttcatcctctagtattccacagtgtctattgttcctacactcatgtccatgtgtgctcaatgcataactcccatttataagtgagaacatgaggtatttggttttctgttcctgcattaatttgtttagggttatagcttccagctccatctatgttactgcaaaggagatgatttcattctttctttttgagatggagtttcgctcttgttgcccaggttggagtgcagtggtgcaatctttgctcactgcaacctccacctcccgggttcaagcgattacctcgcctcagcctcccaagcagctgggattatagttgctcgccaccacgcccagctaatttttgtatttttaatagagacggggtttcaccgtgttggccaggctggtctcaaactcctgacctcaggtgatccgcccacctccgcctcccaaagtgctgggattacaggtgtgagccaccgtgccctgcggattttactcttttttatggctgcatagtattccatgatgtatatgaaccacattttctttatccagtctagcattgatggacacctgggttggttccatgtttttgttattatgaatagtgcagtgatgaacatatgagtgcatgaatttttggtagaatgatttttcttttgcatatctacccaataatgggattgcttggtttaatggtagctctgttttaagttctttaagaaatctccagactgctttccacagtagctgggctaatttgcattcccaccggcagtgcataaggattcccttttctctgtagcctcaccagcatctgttgttttttgatttttaaaataatagccattctgactggtgtgagatggtatctcattgtggttttaatttgcatctctctggtgattagtgatgctgagcgctttttcatatgtttgttcaccacttgtatgtcttcttttgagaagtatctgttcacgtcctttgccattttttaatggggttacttgttttttttttttttttttttgagacggaatcttgctctgtcgcccaggctggagtgcagtgatgcgatctcagctcactgcaagctctgccttccaggttcacgccattctcctgcctcagccttccgagtagctgggactacaggcacccgccaccacgcccagctaatttttttatatttttagtagagatggggtttcaccgtgttagccaggatggtcttgatctcctgactgtgtgatcctcccgcctcggccccccaaagtgctgggattacaggcgtgagccaccgcacccggcctgctccactatattctaatagtcagtgtggtggagatggcagcccagattcaacactctgccctgcctcagaagacccagcccagctaatttttttgtatttttagtagagacggggtttcaccatgttagccaggatggtctccacctcctgacctggtgatccacccgcttcggcctcccaaagtgctgggattacaggcgtgagccactgtgcccggccggggttacttgttttttgcttgttgatttgtttaagttcctaatagattccggatattaggcctttgtcagatgcatagtttgtaagtatcttctctcattctgtaggttgtctgtttaccctgttgatagttcattttgctgtgcagaagctcttgagtttaattaggtcccacttgtcaatttttgttgcaattgctcttggggacttagtcaaaaattatttgccaaggctgatgtcaagaagagtatttcctaagttgtcttccaggatttctatagtttgaggtcttatatttaaatctttaatctattttgcgttactttttacaaatggtgaaaggtaggggtccagcttcaatcttctgcatatggctagccagttatcccagcaccatttattgaatagggagtcctctcctcattgtttgtttatattggccatgtcaaagatcagatagatgtaggtgtcaggttttatttatgagttttctattctgttccagtggtctgtgtgtctgtttttgtgcccataccaagctgtttggtttctgtggctctattgtgtagtttgaagttgggtaacgtgatgccttcagctgtgttctttttgctttaagattgccttggcaatttggtctctttttttggttccatatggattttagaatagtgttttttctgaatctgtaaagaacgttggtagtttgataggaatagcattgaatctgtacattgctttgggcagtatggacatttttatgatattgattattccagtccatgagcatgaaatgtttttctatttatttgcgtcacctctgatttctttcagcaatgttttgtagtgcttatagaaatctttcaactccttggttagctgtattcctaggtgtttttctttttttttttttaatttatttttttattgataattcttgggtgtttctcacagagggggatttggcagggtcatgggacaatagtggagggaaggtcagcagataaacaagtgaacaaaggtctctggttttcctaggcagaggaccctgcggccttccgcagtgtttgtgtccctgattacttgagattagggattggtgatgactcttaacgagcatgctgccttcaagcatctgtttaacaaagcacatcttgtaccgcccttaatccatttaaccctgagtggacacagcacatgtttcagagagcacagggttgggggtaaggtcacagatcaacaggatcccaaggcagaggaatttttcttagtgcagaacaaaatgaaaagtctcccatgtctacttctttctacacagacacggcaaccatccgatttctcaatctcttccccacctttcccgcctttctattccacaaagccgccattgtcatcctggcccgttctcaatgagctgttgggcacacctcccagacggggtggtggccgggcagaggggctcctcacttcccagtaggggcggccgggcagaggcgcccctcacctcccagacggggcggctggccgggcggagggctgacccccccacctccctcccggacggggcggctggccaggcggggggctgacccccccacctccctcccggactgggcggctggccgggtgggggggctgacccccccatctccctcccggacggggtggctggccgggctgaggggctcctcacttcccagtaggggcggccgggcagaggtgcccctcacctcccggacggggcggctggccgggcggggggctgacccccccccacctccctcccggacggggtggctgccgggcggagacgctcctcacttcccagatggggtggctgccgggcggagaggctcctcacttctcagacggggcagctgctgggcggaggggctcctcacttctcagacggggtggttgccaggcagagggtctcctcacttctcagacggggcggccgggcagagacgctcctcacctcccagacggggtctcggccgggcagaggtgctcctcacatcccagatggggcggcggggcagaggcgctccccacatctcagacgatgggtggccgggcagagacgctcctcacttcctagatgtgatggcggctgggaagaggcgctcctcacttcctagatgggatggcggccgggcggagatgctccttactttccagactgggcagccaggcagaggggctcctcacatcccagacgatgggcggccaggcagagacactcctcacttcccagacggggtggcggccgggcagaggctgcaatctcggcactttgggaggccaaggcaggcggctgggaggtgtaggttgtagtgagctgagatcacgccactgcactccagcctgggcaccattgagcactgagtgaacgagactccgtctgcaatcccggcacctcgggaggccgaggttggcagatcactcgcggttaggggctggagaccggcccggccaacacagcgaaaccccgtctccaccaaaaccagtcaggcgtggcggcgcgtgcctgcaatcgcaggcattcggcagactgaggcaggagaatcaggcagggaggttgcagtgagccgagatggcagcagtacagtccagcttcggccccgcatgagagggagaccggggagagggggagggggagggggagggggagggggaaggggagggggagggggagggggagggagagggagagggagagggagagggcaggtgtttcattttctttgtggctagtgtaagtgggattgtgttcttcatttcactcccatttggactttattgttgtatagaaatgctgttgatttttgtacatttgattttgtatcttgaaattttactaaagtcatttatcaattctaggagtctttaggattttctaagtatagaatcatattgtccgtgaagagagatagcttgacttcctcttttcttgtttggatggctattacttcttcctcttgcctgactgctttggctagaatttctaatactctgttgaataggagtggtgaaaatgtgcatccttgtcttgttccagctctcaaggggaatggtttgagcttttgcccattcagtatgatgctggctgtaggtttgtcatagatggctctcagtattatgaggtacattccttcagtgcctagtctgttgaggatttttatcatgaggggctgttggattttatctaaagctttttctgcatctattgagatgatcatacagttttgcttttgattctgtttatgtggtgaaacacatttattgatttgtgtacattgaaacagtcttgcatcacaggaataaagcctacttgattgtggcatattaactttccgatgtgctacttgattttatttgctagtattttgtcgaggacttctgcatctatgttcatgagggatattgttctgaagttttctcttttcactgtgtctctgccagattttggtatcaggctgatgctggcttaatagagtgagttggggcagagcccctccttcttgattttttggaatagtttgagtagtattgatatcagttcttctttgtacttctggtagaatttggctatgaatccatctggcccagggctttttttggttgataggttctttcagatgttgatactggtttattcaggttttcaatctcttcctaattcagtcttgggagattgtgtgcttccaggaatttatccatttcctctagattttataatttgtgtacatagagttattcatactcatctctgaagatcttttataatcctgtgggatcagttgtaatgtcatcttcgtcatttctgattgtgcttatttggatcttctctttctcacatgtaatgacacccacaggctcaaaataaaagggtggagtaaaatctaccatgcaaatggaaattaaaaaagagcaggagactctattcctacatcagataaaacagtctttaaaccaataaaaattaagaaggacaatgaagggcataacatagtaaggatacaatccaaccagaaaccttaactatcctaaatatttgtgcacccaaccgtgtagcacccagattcataaaacaacttcttgagctgtaaaaagacttacagtaccacacaataatagtgggagatttcaacaccctattgacagtgttagatagatcaccaagtcaaaaaactaaccaaaaaactctggacttaaactcaacacttgaccaattggacctaatagacatctgcagaacactccaacaaccacagaacatacattcttcccatctgcatatggaacatattctaagattgaccacattctcagtcataaagcaagtttcaataaattcaaaagaaatcgaaataataccaagcacattctgagaccatagtgcaatgaaaatagaaataaataccaataagatcttggaaaactacaaaaatacatggaaattaaacaacttactcctgaataagtcctgagtgaacataaaaattaaggtagaaataaaaaatgattatttaaaattaatgaaaataaggacataatcttcaaaaatctctgagatacagcattaggaagaaagattgtagccctaaatgccttcatcaagaagttagaaaggtcccaaattaacaatctaactttacacctaaaggaactagagagaaaggaacaaaccaatccaaagaaataattagagaagaacttaataaaatcgagatgcaaaaatccatacgaaagatcaatgaaaccaagtttgtccttcaaaaaaataactaagattgatagactcctagctagattaacaaagaaagagaaagagaagatcctggtaggatttttattggaatggcattgagtctataagatgaatttatggagttgacaccttaataatattattgatgagaaaagtcaaacactgtaaaatatttgaagagatttattctgagctaaatgtgaggaccatgacctgtgggcacaaccccaggaggtccgaggttacagcttgattttatacattttacggagacaaaagttacaggcagacatcaatcaatacatgtaaggtacacattggtttgatccagaaaggtgggacaacttgaaatgggggtttacaggttgtaggtagattaaaagattttttgattggcaattggttgaaagaattaagttattatctaaagccatggaatcaatagaaaggaatgtccggattaggataaggttgtggcgaccaaagttctttttaagtagatgaaatctcataggtggccacctttagatgcaatagatggcaaatgtctcctgtttagacctttaaaaggtgctagactctcagctaatctcttcaggatcagaaagggaaggggattctctacagaatttagattgcccccacaagagacagctttgtagggccattaaaaatgtgtcaaagaaatatattttggggcaaaatacttttcttttagggtctgctgtctgtcatgtgatgctatattagggtgaggttggaatttggtatcttattgctacaaagagtctgcttcatcagttttaatgtctctgttttaaatgttaatgctaatcagctgtgcctgaattccaacgggaggagagtataatgaggcatatctaacgcctcccacccccctctcccatcatggcttgaactgatcgtttaggtttctttgaaactcccttggccaaggggaggattcccattagtcagtgaggggcttagaattttatttttggtttcaaatattgaatcttctgctctaggaacatggcttatctttccatttgtttgggtattatttaatttctctaagcaaaattttatagttttcagtgataggtgttggacatattttgtaagatttatctccaagtgactcattttttggtgttgttgtaaaacatcaatttacatttgttcagtgttggtacataaaacagaattgatttttgtacattgatcttgtgttctgcaaacttgctaaagtaacttattaagtatagcaacttttttgtttgtagatttttttgtgggggattttctaagtaaataatcatgtctgtgaataaagacagttttataaatcaacatacaaaaactaattgtctttatatgttagtaatgaataatctgaaaataaaattaagaaaactgtttcacaaaatcattaagaagaatcacatttttaggattaaatttaataaaaagtacaagatttataattgaacaacacaaaatattgctgagagaacttaaagaagatttagataagtagagagccttcaatgttcctggattggaaaacaacataattaagatgacagtttccccctaatttatctttagatacaaaataatccccaaagcaatgacttactgcagaggaatagtgatggcaaaatggcaaagtgagcagttccaagctcttattcgacccccagaaacgttgaaaacaagcagaaactcttagaaccagcactaagagttgtggaaactgtaaattattgcgtttgctctgatttgtctgtgggctcactgaaggattgacacaagactctgagctctgttttgcctaactcagaacataagctggaaaagtgatgggcattgcttgaagatactgtcagagagtctgacaaactatagaggcctagggcagatgcatactgattgaggcatacaatagactgcctaaaacctaggtgcaaaagctgtaggagattccttgggaacttaggatactcaaaagtacctgtgtgtggatgaacttagaaagccacatacataattagggtgagatgcatgctcagaaaagaccatagaaaaccctaaactttcacctcaagcttaatcttagtctcagtgggagacttgataattgttgatgaagtgctccatcagagccactttgcaaagactgggaaaggtgtttgcttctttggttttgtgttttctctttttctggtttgcttgtaaaatctcctggtattgaagaaaatctctgtcaaaacattagctgaacatgatgttaggaaacagacatgaaaagggatacagtccttggaaaaatagtttggaaaagtacctaaaccaacggactgctacagcatttaataacagtgacaacaacagcaaccactgccaccaacaacaaagtgtttcaacaacaataataataaaaaaaaaaaccccaagacatacaaagaaacaaatccatttaaatcctttaaatggatttgtttctttccatccttgaggaagcccagacatcatattaatacctcctgaaaaaagtctttaaaacatctatcttaaatatgctcagatagctaaaggaaaaagaaggacaaataaatatgggaaataagaaaaacaccgtatgaacaaaatgagtctatcaacaaagagatagaaattataaaaaagaaatcagcaagaaattcttgagctgaaaagtataaatgaaatgaaaaactcacaagtggcattcaacagcagatttaggaaggcagaggaaagaatcagcaggcttgaagataggacaattgaaactgtttaatctgagaggcagaaagaaaaaagaatgaagaaatgtgaatagagcccaagggacctgtggaaagccatcaaatagtacaacatacacattatgggtgttccagacagagaagagagagagagagagaaaggaccagaaaacattttaaagaaataataactgaaaacgacacagatgtacaaatccaagaagctcgatgaattccaaataaggtaaacttaaagagacttatagcaagacacatgtgaaggccaaagagagaatcttgaaagcactgagagagaagtgacttgtcacatacaagggatccttaattacatgcacagttgatttttcatcagaaaccatggaggccagaaggcagtgggatgacatatataaaatgttaaaagaaacatactgtcaactaaaaattctatatctggcaaaactgcccttcaaaaatgagggagatgttaagaaattcccataccaacaaaagctgagggagttctttaacactatacctttcccacaaaaattgttaaagggagtttttcaagctgaaatgaaagcacactagacagtatctcaaatccacataaggaaaaacagagcaccagtaaagaaatctgtataggaaaacataaaacacagcataaatgtatgtttttctatgcaactccttcattctaccatctgctttaaatgacagttgcataaagcagtaattataaatctttgttaaaggatatacaatgtgtaaacgtgtactttatagtcagcaatagaacaaacaggtgagaggaaatagagttatgtaggagcaaaggttctgtatagagctgaaattaagttggcactagttctaaatagattgttttaagatgataattgtaatcctctcagcaatcacaagaaaataactaaaataacatatagtaaaaaaagaagaaaggaatcaaaatgatacactagcaaatatctatttgacttcaaagaaggcagtaatggagaagtgaggaacagaaaaaaacatgaggcatatagaaaaaaataccaaagtagcagataaatcttacctcaatggtaattatattaaacatagatggattaaatacttcaaccaaaaggcagaaattggcagactgggtaaagtaaatgatccaactgtatgctatcgccaagaaacacactttagaatcaaaaccccaaataggctgaaggtaaaagaatggaaaaaggtatatcatgaaaacagtaatcaaaagagaggtagagagactatactaatattggacaaaatagactttaagacaaaaattgttactagagacaagaatttctggtaataaaagtgtcaattcatcaagaagatatacttactattgttaaatggcattactacccaaattaatctacattttcagcacactgatcctgcaagtcatagagaaatgcaagcaatccagaatagccaaaacaaccttgtaaaagaatagcacttggaagactcatgctttctgctttcagaagttactacaaagccacagtaatttaagactgtgtgtttctggcataaggatagacatacagattaatgaaagaggatcaagactccagaaataaactcttatatgtaaattcaattgattttcaccaagggtattaaaacaaataaatacagaaagaatagtctttccaacaaattgtgctgggataactggctatccacatgcaaaagaatgaagttggacccctacttcacatcatatacaaaaattaactcaaaagggatcatagacctaaatgcaagttctaaaactataaaactcctagaagaaaacatggttataaatctttgtgactttgaattatgcagtatcttagatttgatgctaaaagcacaaacaaaaaaagtacataaattggactttatcaaaaagaaaaacttttgtgaataaaagggacactgtcaagaagtggaaagacaagcaacagaacgggagaaaataatggctgacaatatatctgataagggactagtattcggaatatatatagaactcttacaactccataataaaaagactccccccatgcccacaggcaaaatatttaaataggcatttctccaaagaagatattcaaatggcctgtaagcaactgaaaagatgctcaacatcagtggtatttagagaaatgcaaattaaaagctcagtgagatgccatttgacacccaataggatggctatcataaaaaagatggcaatgacaagtgttagggctgatgtggagaaattggaactctcatgcattgccagtgggaatataaaatagtgctgccattttggaaaacagttcagcagttcctcaaactgttcagcatggagttgccatttgatacagcatttctgttactaggtatgtacacaacaaaattgaaaagacatgcctgtgtaaaacttgtgcatatgtgttcaaagcagcattattcctaatggccaaagaaagaagcaacctcattgcccatcaattcatgaatggataaacaaaatttggcatatccatacaacagaacatagttcccataaaaatagaagaagtactgatatgtgctaccacttggataaaccttaaggacatgctcagtgaaagaagccagatataaaaaacgataaattgtatgttttcatttatatgaaatgtcagattagatgtcttagtccattaaggctactgtaacaaaatgccataaactgagtagcttataaacaacagaacattatttctcatagttctggaggctgggaagtgcaaagtcaaggtgctggtgagggcctgttcctcgtaaatggtgccttctctctgtgtactcacctggtggaaggggtgagtgcactctctgggcctcttttaatatggacactaattccattcacaaggactccatcctatttaccatttttttttcttgtgtatggaccatacatgtctttgcatgtgtatatttttgtcagactggacatttaaaagaatataatatggaagctctagtaatcagattcttcccccttcccagggctttttgctgttcctgtttgtttagtgactttcctgaactcatgtttttgagtctgtattctttgttgtgtatggccagtgaattctctgttcagttagtgactggacagaggtattcttaaataagggctgggaccattaagtctccctgcctttgtcaaggggctgtgtgtgcatgttggggtcggctttcagcttccagccagacattctgccttcttcttcacttctggcttctgcagagcctcacggtcatccagaggtgagtgggtagaacttcacaggtccctcttgggcacacgtacagccctgtgcttgaatgcctaggaatgtgttgaagctttacaaactgctttttcttttgtgttttttggttggcttcttgttagccccagtggctgttgctgcctcaggaagctgtgatgttaaacacttgctgctcattgtttgtggcaaacgcccaggagagaaggctattcacctctggagctctgagcctggtccaatacagatggtacctgtgagaggggtagtcaaggtactgccagacagctccaatagtgccagttctctgtaaaggagatttggaagtgccctagtccaattctgctctcttcaatggctactaggcctctggttttcaccatcatggcagggctgattttcaagcccagcacagaactgggtaaagggatatggcagtagagcaagttaaaattttctcactgagacttggccatcctctagaatacatgctccatggattgttttatacttttgttaacttccaaagttctgaaaatattgattttgacaagttttgtctgtttttgctgcttctatggaggagagaatgtctacacgtcctttctgtgccattcctgctgttacctcgtcttcctttgatttgaaagcaaatctcatcttacaaaaataatacttttgagatactaagtggaagtgcttttctatccccacaagggtgcaagaagattaggtttggcttagaacagacaagtcattgctcattttgtatttcaagctaggattaaaaaaaataaaattcatagcagcaaggtgatcatttcgcaaggctgggcaggaggtgctggtctggtcagcacatcccagcctgcagtgccccagctagagggcgtgcaggccttgctggagcagtgtccatgaggtggtctgagactgattcctggcctccagttccaggcaggcatgctggggacctacacttcccacctgcctcagtgcggggccggcaccctgaggagcctggcagggaccaggtgaaacatgagactgcagcagaggtgctggcaccaggggtgggagctcctgcaatgccatgagggttggtggaagcagcgggttgcatgaggggcatgcggcgtgtgctcgcccacagccttcccctttcatggtgccattgtgtgtgctgctccttgggtggggagaaatcctgattgggagtctgaactttggcttgaatgaatgtgtacataaagagagactcttaaatagaaagaaacggagtaagtactaattgacttcacatgctcccattcatcaaggggactagcggccggttatatttaatagaaactggagtgaatgaattacacacgaagtgacccagtgcgtgttccagctctgcccaggcatgcttccttccaagaggagatttgctcttccctttttgggtcaataaaatggaaaatctgcagaagactttactactagggagcaaaaggcatttagaagtctttaaaaattgttcttttcacataattttaatgtagtacatcttttagttaatctcaaatttagatttgtcttatgatgatgatgattattattattactatttctgagacagggtcttgctctgtcgctcaggttggagtgcagtggtgcagtcatagctcactgcatgcttgacctgtgctcaaggggtcctcctgccttggcctcccaaagtgctgggattacaggcaagggccaccacactcagcctatcttatccttctgatgattttaataaggaaaaaataagatttaccttattcctttgctgataagttttgggttattcaaatgaataactgatttccctggccactgcagtagctcacgccccacctccctgcagctccaggatgttccccaaatgcagaccagctttgccctgcgtggctcctgcaggccagccttcaccttctcagtcttctgctctcttgtgggcacagggaggaactggagcttgagtggacagggcaggctttcaaacatcttcagaaagtgcagtttgtcgccttctaagcagtgaggtgcatttggtgtgatctaatgtcctatgcactctccttttcctaggggaaggcaggcttcactgagcgctctctggacccagtgggaatgtgccccttcatccagcaccagagctgtcctcatctgcggggcccttggggacctccactgcatcccctcaggacttctgggagcagggagaggacccaggccctggaccacaggcttgcaccccagcgcagactctcccctgcacacctgccccctggactgggctctgggatgctacgtttattacctcttctagtcccacttgcctgcaagggaggagctgttcatagctattttgggggctgaaatagtgacaattttctgttaagtgttttggtcacctggattattactatttatacaaaagagcaacatacataaagtcactaacactggtctctaagaaatagagaagtcgacatcatgttcccagcagggcaccaccccatctctctgagatgtgtctgggtttgccacctcagggggatgaggaggtgacagggagtccagaaaatgagcagtggaggggcacagggtggcagggtgggtggtggggcctgagccaggtggccagcgtgccctgggccagtacctcctgcatgattcctgcagctgcagagggagccttccctgctagaggcagatgaaagagggagcgctcagaaaaaatcggacaaaggccccaccacagaggaaggccaattcccagaggacattgcagacggaagaggcggtagaggcaagggtggcagcagccaggcccagctcctggccttcgtccttccctgtgggcagtggaccagcacccagagccaccccttatcaaccctcctgctgcagttttgccttcagcattcaagtggctatgcatgtggatagcatttccccaaagtctctcatttcattattgggggggaccctcaagctttgagggtcagttcccaggcccttataaggctatgagagaatgtctaccagcccttcagggtaccagggcacttggtgggccagggtgacctgctgcaggtacccagctctgggtgggtcctcacatgtcactccccgctgtgccaggaccaggcaggctgcctcccggtgtgtgaggctgtttacgatccagtagtcacagggtccagcctggtggcttagtttggttgatctgggaagggatcagtcttgttggacagtttactttcccctcctgctttactcctgagttttctgagtacaaatcccacccgtctttgtgatgacgttgttcccacctgttcccctgcagcagcggctgcttacctgtcttactctcagagggcttgtgcccaggaggctttgctgtctgagagcagggagtgtgtcttgttcatgcctgcccctggccaagcgagtgctcgataaatatttgaatgcaagagtagcttatatgtatttttgggccaatgtttttggagtatgtgtagtagggccatttcttggtggggagcagacattctgggagtgtaggagccttgtctgtggggccctgtctgttacagagctgatgcagcagtgacagtggctgggcaggccaagggattcactggtctccaggacatctcaggggcacagataccctgacaagggcatggaggcttctcacagtgcaggccccatagagagctgctattatgttgagggccgtggcaacatcacagggcaatgtcttggagtttcatagagttgatttccatgagcattggattctagctcctgtaggttgccaggtgttcttgtggatcaaaaataatgagaccatcacctacaagcactggagaattggatagtttcaaaaaggtgctttcttcaatgtattcataaaatgtaaagtctaaatgcatttcctatttgaagctcttaggaatcagactttttgtgccagaatcctttctgaaacatgtgttctattttatgctatcaatcattgcaactttgcaatggaagaagtgtgttcagaaaagcaatacaaacctaaagcatgctttcctatgggccctccctttctagaaatgcagccactgcctctgctgaactaggaggggggcctgagagggtgcaccgactgcccaaggtcacacatgcaccagaggcagggggcaggcagctggggcaggggccaccccactggcctatgtccctgtcctcgttgcctggctccgagagagacactcagcatcgtggtactcactaagggtctagcacctgaatattcatatagtgtggagccctgttgagctcaccctggcagggacttgcaggggcagggataggagcgcgtgatgagccccactggggtgtcacatggacagccctggagggtgtggagctcagcagtgatgcaggtgtcacctgggagccacactgccatcctccacacacacatgtccactgctgatgctttcctaacgactcagttttcaaagagcagtggaaagaagtaaagcagcgtgcccccacgtcaccccaaaggacaggaatgcagtgtgctgtgcagatgtccctgagcagggagggcaaccgttttcccagtgcagggtcctacatcttgacaggtgttgggtttggcttccggccagtgagtcccagacagcccgtcttgttcctcctgtggacaaattttctgggggaaaacttaaagttgcacaagcaataggaacgtctcccatccagccagtggtagaattttgtcatgaatgccagtgctcaagaagagaggctcctgtcagtgggaattcttgagaaatcatggccaagtggactgtttcatgtcagacttctctgcatatgaaaacgctgtttctacatgggaagcacacaggcaggtcccatggtgggctgtggagcgaggctctccctctggttacccagactgaactggccagcccccagtcagcgttgcaggcacttgtacagcaaggtggccagagcccagggccacgaggctccaggggcccctggagtgcaggggaccaggggacagtgtcctaggaacagacactgctctgggtctctgccctcttgtgtctctcctttctctctggccttttctgctcccccagtcagatcccggttgagttctggaatcccagggctcctggcaggtccttgaccacttgctgtctcctccggagatgagcaatccatgctctgcatctgaagcaggggtcagctggggttcccagcttcttctgtcctgctgcaccgtgaggatggccaggcacctaggggtgggggacataggccggggagatgtccctgaggggaggtggccctcgaggaggctgcaggtgagggagccggccttccctgctcaggtgggcttggctccccgctggccatacccactcacttgaggaggctggagcaccaaaccactgtgatgtggcctgggaggggccaggccccacagcattccacacatagctttcctaagccttggaaaatgtaaggaagacacccattgaggataccaccccaaacaaaccatctaggagcacacttccatggatgttcagtacctacgtgaaaggccaactctgcccaaagccctcgaacttctgcaatgagcggttctcaggggaaacagcattgaaatgaaagcaaacctggaagaagtctcagtgcaattgctttacaacttgacgaggcttcttttgcagataaaagttttggggaaaaatgcaagtgtgagatcagatatgtgaaaaaacaaatatgtgaagagaaacacgaaagacgagaaggaatgagggaactttgtcctgtaactggccacattttatataatgccacaccaacacaggaataacaggaaagtcccagatacaggtgtatgacaaactcagcaaacccaacctcttagacaactgcaaaagtgtggctcacccatgttacgaaagtggacacgcatttggagaggaactgatagggtttggctctgtgtccccacccaaatctcaccttgaattgtaataatccccacatgtcaagggtgggaacaggtggagataattgaatcacgggcgtggtttcccccatgctattctggtgatagtaaatgagttctcacaagagctgatggttttataaggggcttccccctttgctctgctctcattcttctctctcctcccaccacgtgaagaaggacatgtttgcttctccttctgccatgattgtaaattttctgaggccttcccagccatgtggaactgtgagtcaattaaacctcttttctttataaattacccagtgtctcaggcagtttttttatagcagcatgagaacgggctaatacagtaacaaaaagttgcattcagttttttgccaagataaatcttggacttatgtgtaagtaacaataatgtaagagtactagaaaaagcacatgtgaagaaatccttatgtaattttgggagaggggtatctctatggcagcaacatagaactgtcttcatgaaacgtgatgtattgaggtctcaacatttgggccctgtgtcagggcagagccggccaggctctggagccagtcaagatgggtgtgggaggtgttgccaggatcagaaaacacgttgaggtggggctcctcttggccacaaacatgctgctgtgcctgcaggagccatttggccatctccagaggaccagcacgcacatgtacatagctatgcacacacataaacacacacttcatacatgcatgcatacatacccacacagttatacatgtgtacatgcatgcacacatgattatatgcatccacacacatttatacatgtatatatgcatacacacatacacatacatacacacatacatgtgtgcacacatacccatacacacatatacctataatacatatatgtacagtatttgtatacatacacatatttacatacacatgcacctatatacatgcacatatttacacatacatatatatgcacttacacatgcccacatatatacatgcacatatttatacacatacatatatacacatttacaaacacacacccacactcatatagcgatttctatcttctgttactctggaccctcatgagtttagaagggggtgagccagggtgggggatccggagacagctgtccacttgcctgtgggggcagtggttgggagcagatgacctgagctcagtgggctaccacttttgccaggtattggtcttgtcattctaagatggacataacaacaattcctgcccgtggttgcgctgagcatcgtgagacaaagtgcccagaataggctcagctagttgcaagagcagagagtgtggtcttgtgctgggaggccctctgaggtggggcctctgaggtgaggtccccctctttgggagacctcatgggctggggcagcatgtctggactccaggggcctcatcagcaagagcccaggcttgttttgggagcctggagggaggtagccatggtagtagccctgagtggaacagctgtgcccagcacagtgaccatctcttgggcagtgtgggtgatgccttgagaaatgcttggaatcagccagggtcactttgagggcctaatatctggcacaggggctgggagagggttgtcactgtgctttgtgatgaaggaagagcacctccaccttggtcaggctattgaggttggggggcgtttcctggtcccctcttccctcccacacctcctaagaggcatcttccttcccaggtgtgtgaaggtgaacgtggctgtcttgtgccctccatggcccacccatgtgggtgctgcctggagatacacaccatgtgtgtgccaaggaaaggtaccaatgactgtaacgatgacgctgtggccacaagcctctccaaccaactctttggtgattttctgatatcagtatagttacatacacacgcaactgaggctatatcagaatggcctttccagtctcgcttttgaaagtggaatcccatttaatattttcattctgatctacatgaaattcaaacctgccttgaagacccacctcagattccctctgtgaagccttacctggcagcgcagtcattgccatcgccatccctgtctgcttctacggtcttcaccttgcgttatacttgctcacagagtcttacgtgcctgagtaaggcgataggccagcaactcacctgtccattacccccttcctagaacagcacctgggccagtacccattgaggaattattggtaacattctgataaaatacagaattgcaaaatttaacatttctcaatttggaattttgtcgaagcctgtgagcttgcttaatgcagggcattagacctctgtgaaaatgcagaaatagtattctagttttacatcgtatcgtagtgtcattatttgctttgcatctattcacagtttatagagtatctgatggggtggaattattttgggggtttatggatttattctcatgtttccccaccagcttctactgatttccctttttaacttgtggatttgcatttgggttgattagctctgaggccagcaatgctcagagctagactgaggttgatccctgcatgattccaagtttggaagggtcatgaacggcctctcagcagaaggcgtgattatttttatctgtggctgtactgtaattagaacacagctgtgagagttggtagtttacaagtttctaatgagctatttccttccccaatcacattagttggggagttaattgggtccatctggtgcataattcacagtatctctaatatctgtgattttataagcctgtggcaaacttggactctcgattcacaagggggagttttggtgcttgagttcaacggcagagtttagtgaaatgcagggacagcaaagctgagctggggctttgcagtaaacatgccctaggaagcagagccactggattccagtgaggtggtcagggccattcagcaccccagccagcctcagggatctggttcctgaggggggtcactgatctgtgggttacccggccaggcccagcctctgataggaggatcctctccagctcagtgaagcagaggggggttagacagtagctacaaatgctggctttcttctcatgatgaatgtatgttcctgatttttttgcagaatagtgtgctacagggcacaaggctataggaaagataacatggggcatatctataaactcctggtcacatgaggacgaaatctgacccaatcaaccagtgcccaagcatcccatggtccccgcctgcacccttcggagactacacctggtctggaggctgggacaggaggattgcttgaggctgggagttggaagctgcagtgcgccatggtctggcctctgaatgaatagccactacactccagcctgggcagcctagtgagacctgtgtctattaaaaaaaaaaaaaaaaaaaaaaaaaaaggaaggccaggcgcagtggctcatgcctgtaatcccagcactttgggaggctgaggcgggcggatcacctgaggccaggagcttgagaccagcctgatcaacatggagaaaccccatctctgctaaaaaaacaaaattaggtggacgtggtagcgcatgcttgtaatcctagctactcgggaagctgaggcaggagaattgcttgaacctgggaggcggagattgctgtaagcagagatcacaccattgcactccagcctgagtgacaagagtgaaactgtctcaaaaaacaaaacaaaacaaaacaaaaccataaagggaaatgtctgtagatttcccaactgtagttccttgcctggaagcatagcatactgcacagtgtggtggtgctggcagccagtgagccaggatgtccttttgaggccagcgccctccacaacattctctaagtgtgagtaaacttgcccccttgcttcaacacatccctgtgggaagacctgcagaggtcccagctccagaggcctccaggcaggatccaccctcatatgggtgggaggcaggcacaacccaagtcaccatgccctgtgcagggccacacatgcagcccagctccgagtggctgtactggggtggagggcagtagggggtgcagggcagaggaggggtgctgcagggcaaggatggggcgggatgggtgagatggggatggaaccggtttcattttccctagtggcatgagggagagtagtactgacttctcagggtctgctcctgaccaagagccactccatgccatgtgttttacctgcactcggcatgtctgtgtggcctcatgtccaggagaggatagttctgccggcaacaagaatgacacaacaatcatcatgaaatggattaaagacaacctgaggtgtatgaagcaataggtgcgtattatgtctgtctcctagatgaagaggatgcgtgcgtatgctcattcccatgctttcccaccactggagggcactggtctttttttttttttttttcttttttgagatggagtctcaccctgtcacccaggctggagtacagtggcacgatctcgactcacttcaacctccgcctcccgggttcaagctattctcctgcctcagcctcccaagtagctgggattacagacgcctgccactattgctggcctgctaatttttgcgtttttagtagagacggggtttcaccatgttggccaggctggtctcgaactcgacctcaggtgatctgcttgcctcagcctcccaagagggtattgatcttttcctttttttctgtgaaacaaggtcttgctctgttgcccagactggagtgcaatggtgcgatcaaagctcactgcagcctgaaactcctgggctcaagcgatcctcccacctcaccctcctgagtagctgggactacaggcatgtgccactacacccagctaacttttaacatttttttttctggagagatgggatcttgctatgttgcccaggctggtctcaaactcctggcttcaaatgatcctcctgccttagcctcccaaagagttgggattacaggtgtgaactaccaccccagcccaattttttcaattatttttagtgtggaaaaaatatatatcatataatctaccattttagccatttttaagtgtacaattcaatggcattaattacattcctaatgggcaaccatcagcacaaattctaaaattttttcatcactccaactatgaactctgtgctcattaagcaataactctccgtgccttcctccccacaggctctggaacctgcaatttcctttctgtctctgtatttaccttttgtagatatttcatacacgtgaactcatgcagcatttgtccttttgttcctggcttattcattcagcatgatgttttcaaggttcatcatattcggcatgtgtcagaatttcattccttttatgagtaaatgatgtttcattgtgtgtatataccatattttattaatcttttattgatagacatgggttgtttccacattttggctattttgaataatgtggcaatgaatattggtgtataagtatctgagtccctgctttccattattttgggatatacatctaggagtgaaatcgctagattatgtggtaactatgtttaactttgtgagaacctgcaaaactgtttttcatagagttttccacactttgcattattactagcagtgcatgagagttctggtttctctatatactcaccaacatttatattcctttttttattctagccatcctagtcagtgtgaagtaatatctcatagtagttttgctttacatttctctaatgactaatgatgttgagcatctttttatgtgcttattggccttctgtatatcttctttgaagaactgttcatgtaagtctttcgcccatttaaaaattgggttgtatttttgttgttgagttgtaggagtttttaaaatattggatactagacccttatcaatatatgatttgcaagcaatttctttaattccataggttgtcgtttcactttcttgagaatgtcttttgttctcttgtttttgagacagggtgttgctctgtaacccaggctggagtgcagtggtgtcattatggctcactgcaatctctgtctcccgggttcaggccatcctcctcagcgtctcaaatagctgagactacaggtatatgccaccatgcctcactaatttttgtattttgggtagagacagggtttcaccatgttgcccaggctggtctcaaactcctgaactcaagtgatctttccaccttagcctcccaaagtgctgggattatggtcatgagccaccgtgcccggccctgaaatgtcttttgaagcgcaaaggattttaattttgatgaagctcaatttatctatttttttttctgttattgcttgggattttggtgctatagctaaagatccattgccaaatccaaggtcatgtttgtttttttctaagaattttatggttttatcttaaataaatgatctattttgagtcaattgttttatagggtgtgaggtaggggtctaacttcattcttttgcacgtggaaatttagttatcccagcaccaattgttgaagagactatttattctctgttgaatggtctttgcactcttgccacaaaactggttggccataagatgtatgagtttatttctggactttcatttgtattccattgtagtaagttttgatatttgaaaatgtgagtactggaaagttgttctttgtcaagattgttttggctgttcagagccccttgaagttccatatgaatttgatgaccagcttttacatttctttggaattttgataggtgttgcactgaatcactttggatagtattaaaatattaatgacattaagtcttcttatccatgaacatagggtgcattttaatttatttaggtcttctttaatttctttcagttatgttttacagtttttagtgtacacgtcttttacctctttgttaaatttatttttagctattttgttcttttggatgctattgtaaatggaattgttttcttaatttcctttttcagatagttcattgctgatgtatagcaacacaacaaatattttgcattgaaaattgtacttgcaacttgatgaattaatttattagctcagtagctttcttgtggattctttgggattttctacatatagattcatgggatcatgtctgcaaatggagatatttttacttcttccttccccatctggatgtcttttatttctttttcttgtttaattactctggcttgaacttcaagtacaatggtgaattagcaatagtgaaagtaggcatccttgatttgttcctgatcttagggggaaaattttcagtcttttaccattgagtatgatgttagctggctgtgggtttttcatatatatcctttatcacgttgaggcagttctcttctattcctagttttctgggtaattttcaccctactcccagagagcttatgcttaagatggaagatggcaggaagacataacaagtgggggaagaagcctagaccacgtgtttccctggagtccatctatatgacatgaggtctgtctgtatgtcttaatggtgatgaagttgacaatgttcaaaggatggtgccatggacagataatcatgccaagctggagaggtccgaattcatcctctatgccagtgtttctcataatgtggtactatatcaatatctcctaggtgttaaaaatatagctctttgagccacactctcttctgaatcagagtctctggaggaggattctgggaaattgtctttgaagtaaattcctcaggtgatttgactgtgggcttatttttggaaaccactgctataggtcatggtgggagagaatgaggtgagaatggtgttttggggagtctgaagtttgtgagatggcctgggatataggccagggcatgtgtcagggcctgaccaaagagagggatgcacaggcaggcatgggagtgtgtgctggcaaatttttttcggagaggggagtccagtgatctttggattgttccagatctagagttgttcccaataattctaggatcccaaaattttcaaagaggatgacaagagggaaatcttgagcaggtggcttttaggaaaacattaattcatttttaggcatgtcgatttgaagtaagagtaaagccaggcttgtggctgcctaccctgtgtgaagaggcacagcctctataaaaggaataaccccaaatttccatcacaatatcggttcatttcttgcttgtatggatgaagtccacttggcagcatggtggtagtgctgtggtcattattcagcaccagcatgataggtaccctgtcctgttgttgtcagtgcatggttggttgccccttccctcctttccccctgccctctgccctgggatatgacctctagggacttcttagagctccctggtggcttctggctgggttcagcccatggggcatggtaggagatggagcatgatgcgactggggctcttatttcttcagtcctccctttcctgtcctcccagaaagacccttgtggctgatgtgtccttaacaagagacctccattcatctcagaatggctcttctgcaagactcttttctgctgggttctgacaactgcctcctccctttatccccttcaggccaggggtggtaacagatctgctgttcctaaccccatcatactgcacgtgtgttttccctacactctgcctacacttttgcaaattttccctttattgaatcctccttgaattattctgacttagtgagccacccatttccttctggtatcctgactggtagaatagcttccaagatggcactgcgggtaaagtccatctggagtgtggaagaagagagagggaggatgatgcacaggaagagagagtctggagtgtcatccatcatgtcctcctctggccactatctgggacttggttctgtggtcccctgaaatagaaggggtgggacacgtggtccctaaccagcgagccatctcatagcagcaactccacactgagcagctgccctggtgaagagctggtggtctgtgttgcaggaaggggcagttctcaagactgagggttttggtatgaatattcagtatcacttaacctgatatcaccaggatattttaggtgtcttaagagtgatgatagcacaacaccctgttttagagactagtatatatgagtttggaggaaactgtgacagataactaagaagtatttgttggagagaaatactggatttctctgtaaaatactgtagcctggatttaagtagttctggcattttctgtgctatgtgccgggtgctgtgctgggaggcagttacataagcaagtggccctgatatgttgagttaaatgtggtactggtgagtgtgaggtccagccaggtagagggtgtatgagctccagctccatcagaggaaaatgggtctgcacaaaggaatggagggtaccagaaacactgacagctttgtaaatctacacattccttcttatcattaaaaggtaattggcaattgaaataaaaataatcaaaatgaagtgtgcgtctcatatcacatgtaaaaatgtgacagcagtgatacaaaggctgaggagagaaatggaagcacactcttcttgtatgtgaaccacagtgtaccatagaggtaaagtgttatatactgtatatgtgtacatacatgtatatattcctattgtatgctctctagcaatgggtataatatcattttcagttagactgtgggaagttaaagatgtatactgtaaaccctaaagcaatacctagaataaaaaagagttataactaataagccaataaaaggataaaatggaatcatacaaaataattaatgcaaaataaggcagaaaaagggaacaaggaacagattgtcaaatagaaaacaagtatcaagatggtagatttaaatctaaatatatttctaatcacattatatgtgaatggacttattatctcgattaaaaggtagacattgtcatattgggaaagaaataaaaattgaactatatgctacttataaaggaaccaattctaagtattaaaatcattctaagtattaaaataacatatggagataggttaaatacaaaaatgaaaaaagacatacagtgctaaaactgatactgtccaaagaaaaatgggatgtctatattaatatcagaaaaagtaggttacagagcaaagaatattactagggacaaagaaggccagaccataatgatacaggggtcaattgatcccaaggacataattcacagtgcatatggacttagtaacagagctgcaaaatacacgaagcaaaaactgatagaacacaagaaagaatcatagttggagatttcaatacccccttcttattaattaatagaacaaatagacagaaaatcctgtaaagccatgacttgttcagatgcctgtagcacgtggcagggataattgccatctgcagagaaatgtgctattattcactgtgacgagtctccaggccgtgtatgtgtcaggtccatgccaggccactgggacaagaatctcctggacaagcatcctggacaagcatcctggataagtatccaggaaggccagtggttttcgaagaagagcttaggaaatatacctagccactgtgtcactggcagagtctacctaggaacatgagatagggacaatctgccatctgcttcatgcatgcgttgccacctactatcatttcagagaatgcccttgaatgtttcattgatttcaaattagatattggttagaataattttttaagactatacttcccctttttttatgtgggatatcactgttgagcaagttgtacacatacacatatataatatgaaaaatgttaacacaagttgtaaaatggtctttcagagagctgtctactctggcaaaatggaatgagctcaggcttcatccaataacatatggaggtactgtctgcccatctgtgttcctgttgacattgctcaatgttttcctttccaggactcaagcattcattggcctttctgtgaaagtatggctattaggaaaagatacagcttttaactcatggcctgcacatcattcattaacatgaagaatcttatctttcttccttgaaaagcatagcccatctggtttgttttgggaggagtatacttctgtgctttgtgcaataaaaatgatttatctcttcaataaccagcccagtcacaagcccatctaatgttaataattaattttggggctttccagctaactggagtgaatgttggtctgatttcttccctcgggttttttctgcctgaaaacaatccttccaatactgatttctttgcacactgggctgagatttgaaaacttgcttaattacatggcagtggttctctaaacaggagtctttcatgttccatccgtttgctttgaaaaggaaggattgcatccttatgtctgaggaattacttaagcccaaggatcgaatgttctgttttactacctgtgtgtaagccccagaaaaaatgggcaccaatcttctttattgtgatttttggagatttattgagcgatcaccagcttcacagcaagctggatagaaacagccatgcatgtttggctttatttctggtatgtctacttcttgtgtctcactgggctcaggcactaccctaccacctctccgtctctctgttgaattgtaaacttcaaaaatcctaccactgggcctacttgctgtttaaactactttccttaggggaaaggacaattgaaattagaccttaaatacaggtgatgttcttacatccaagtaatcctaaaattgctcctgtaaatatttctcagtgaatacctccccaggctttggggcatatgattatacttttttgccaattattaatatccatttatattcaatatttcttgtgttaactgtccttacaaattgtctggaagcattttaaaaacagtttgtagacattctcttaaaaatattaatttgcaccctctgtaatgaaactagttgttcgaacaaaggttaccatcaaccctaacatattttccaattagggggcactgctaggattggtggagtataaacgaataaaattttattatgttggcagagagagaaagtgaaaaaacttttcacttgtaaagactgcattcttttaatccctttttctgctactattaatatataatatacagggcatcttggtttggcaattcatttgaaactttaatattcctattaatactcactttacctccaagtcccttaatttttagaaagcattttatttatttatttatttatttattatttatttatttactttgagacagagtcacactatgccacctaggctggagtgcggtggtgcaatcttggttcactgcaatctccacctcctgggttcaagtgagtctcctgcctcagcctcccaagtagctgggaccacaggtgtgtatcaccacgcccagctaattttttttttttttttttgtatttttagtagagatagggtttcctcatgttggccaggctggtcttgaattcctggcctcaagtgatccacccaccttggcctcccaaagtgctgggattacaggcgtgagccaccgcacctggcccgaaggcatttttaaaataagagtttcttcatttcatagaatagctagaaatgataagtagaaatgattagttttcatcttgtatttcagggtttcagtacagtctttcatcccatcatttcttgaattcctattttctatccttccctgtatcatttatttactgtgcaaatttctcttgttttcaagttgataagttcattcttcctttaaaaatagcatgtaatatttgatctacacaaaataatatatgtaacatatggataggttatgaagtttagtttttacaaacccctgtatgctcaccaaccaattgttcctcttttaccccatctctttgcttcccaacatggagacttctctctggaattgtgtatttaaaattcctgtatgtgtacgcatgcctctctctctctctcatctcatgcacattcactctttctatctaaaaccaaataaatttatcctaaacaatgtattcttcagtgtgtcttggttttgagccttataaaaattgcatcatgtgtgtattcttctatttttcttcatgcaacattatgtttctaagatttatccatattgatttgtttagctgtagttcatttatttccactattgtgtgaaattccattgtgtgaatataccattgtgtgttgattttgtatccttcagttatgctgaatttattaatcctaatgattttaaaaatggagtctttagagttttctacacataaagttgtgttatctacaaatagagataattttacttcttcctttccagtttggatgcctttcatttgtttttctccccacctgttctggctagaacttccaatactgcattgagtagaagtagcaaaacaggcatccttaccttgttcctagtcataggggaaaagctttcagtctttcaccattcagtgtgatgttagctgtgcgtttttcataaatagtctttattatgttacagtagtttccttctattcctagtttgctgagggtgtgcattttttttttttttaatcatgaaagggtgttgaactttgtcaaatgtttttcctgcatcagttgagatgctcacgtttttttttctttactgtgttaatgtgtatttcatagattgatttttcccattttaagccatctcagtataccaggaataaatcctacttcatcatggtgtataatacttttaatatgctgctgagtttgatttgcttagtattgagtattttgttgaggatttttgcatcagtattcaccaggaatatcggtttgtagttttcttttcgtatagtgtctttgtctggctttggtatcagggtaatgctggcctcatagaataagttaggaagttaggtctcacagaatgagtttgccctccttttcaattttctggaagagtttgagaagaattggtgttaatttttctttaaacgtttggtagaatgcaccagtaaggctatctcatccagggcttttctttgttgggaagtttttgattactgattcaatctttttcctggttgtaggtctattcagatttttttatttctccatgattcagtcttggtaggttgtgtgtacttaggaatttgtccatttcatctaggttatccaattttggggcatacagttgttcatagtattttcttataatactttttattttttaaaaattggtagtcatgtccctgattccatttctgattttaataatttgagtttttccttagtcagtctagctaaagatctgtcaattttgttaatctcttcaaaaaaccaacttttggtctcattaattttctttatttttaaaattcactacagatctcctctctaatatttattatttctgttagctttttagtttagtttgttctcctttttccagttccttatcgtataaaattaggttgctaatttgtgatctttcttcttttttaatgtcagcatttacagctataaatttcccttttagtactgctttcactgcaccacataaattttgatgtgttatgtttcattttcatttgtctcaaggtattatattagtttgctagaattgccatcacaaaatgccagactgtgtggcttaaacaacaaaaattaattttctcactgttcttgaggctagaagtccaaggtcaaggtgctggtatggttggtttcttctgagtcctgtctccttggcatgcaatggctccactcttccttcctcttcacatggttctgtcagtgcatgtgtgctcctggtgtctctttgtgtgtttgaagtgtttgaatttcctcttcttttttttttttttttgagatggagtctctctctgtcacccaggctggagtgcagtggcacaatcttggctcactgcaacctccgcctcttgggttcaagcagttctcctgcctcagcctcccgagtagctgggattataggtgcgtgcgaccacacccggctatttttttatttttagcagagacagggtttcaccatgttggccaggctgatcttgaacttctgaccttgtgatccacctgccttggcctcccaaagcattgggattacaggcatgagccaccgcgcctggccaaacttcctcttcttataaggacaccagtcagattgggtttagatccatcctaatggcttcattttaacttaatcatttcctgaaagacctcatctccaaacacattcacacattgtggggtactaggggttagggcttcaacataggaatttcaaagctacacagttcagcccataacaggtgttttctaattcctcctttgatggattggttaagagtatgttgtttaatttccacattttggtgaattttctagttttccttctgttattgatttccagttcattcctattatgattggaaaagatactttgtattacttcaaatttttaaaaattattaaaacttgtgtcctaacatatggtctattctggaaaacgtttcatgtgcacattagataaaagtgtattctgctattgttgggtggagtgttttgtatatgtctgttaggtccaattggtttataatgttgttcaagtcttctgttttgttattgatcttctgtctggctatactatccattattaacagtgaagtattgaagtcttcaaccattatggtagagtgatttttccctcctgttttgtcagcatcatatattttggagctctaatgtttggtgcatattatttgtagttgttataacttcttggtgaattgactcttttatcattatataatatttttctttgcctcttgtaacggtttttgtcttaaagtctatttcgtcttaactctcttttggttactactagcattgaaatatcttttctcatcctttcactttcaacctatttatgtcttttgatctacagtgcatctcttgtagacagcatataattgaactgtgtgtatgtgtgtgtgttttaaaatccattctgccactctttgccttttgattggagagcttagtccatttacactgattttgtttagttatttatccatgttttgccaaatggctttgtgctgggtcaatccttcataactggctgggtgtgccttgaacctagagaccagcatgaggtgagtgcttacagtcttctcagatgttttctgagcatgcatcttgcttgatcatgtttgtgtttttttcggtttttcagtacacttttcaatattttaatttcccaaagagtctcattcaaacttcaccttggtgccttagatggactgtggtctatctttacccataatctctttcctgagaagtctgtgaatctgtactctccctgttctgtgactctatctcctgaaaatgtgtgcatagggccactatgcaaagctgtgctgaactttgcactgtattttttctgtgttacgttacacttaaagggctgaccttgctcatacagaatgatgccagactcccagaggctctgactgtacacgggtgaggaatcatagtctccttccaagccttctgaaaaattgcccatgagagctggcagcttccttactcatgtttcttcctcagatctgccttctgtctatgggaaacatgtttggctgtgttctgtgtggttgcttttggggtaaacctagccttaccactgcctgctagtttgctttttcctcctggaaaggcagcttgggtcagtgaagccaggatgaaaacaggccgcaaacaagagtccctgtcagagagagggagagagaaagagaggagaagagagaagagtacatagggatacagaaagagaaatagcgaagggaggagatagggatagagaaagagaaagagagaaagaaacagacaggtgaaaccttgctagtcagcctgctgggcagagggggctacaggagggctgggttctgttggcttgctgtggctccccatgactgctgctccatgcagagtacatctgtacagagggtaccatgcctggcacaatcctcaggctgggatgtgttgccttctggtgggagggaagggctgggggatggcatcaggtgctggacacatgttggccctgccctcagcagctgggagcctatcctgagtcccatttgctccttttaaaatgaggataatattatctaccttcagggttatcatgaaggttaaatgagataaaaaaggtgatagcttcagcaagagcctaacatagaaagtacttgcttaaatgaccatggttgttattaatactcatcaactaaaatcctggtaataatatggtggggaaaaggccttttgtctacaggatacttcagagatactgtcaagcaattgggacagagagtgaagggccccaagtagaaggcctaaacccgcttctgctgtctgcggcctgtctcttgccctggagatacttcccatgagggacccctcctggtcactgctgcataggctctgttacagagaaggcctcattgctcagcttggttttcccacagctgatctccaatgttaccaaccactggggtccttcctgttacagacctcctgacctgggtgtagagggaccaccagctgccttcctgccctctgacttctgcttgatttattttggtcccactcccagtctggccctgtcttgatttctcttggtcccactcccaggctggtcccactcccagcagctcttttacacggctctgcatggctgatgccatctgccacctgccctctgtcctgagccattggctctcgaccttcctgcctgctctgtggtcttcctgagtggtgcctgggaaagagcctgcatatgacttgagcaggcatcccttggagaatctgtggatgtgaatttggtcatgcacaggttaaggcagtgaaagcactttgtattccttgttaccggctctgtatcatcttgtccagcagaactgacctcagcaatggctgcataaatggtgcctatgtggcacagggcctaagaaagactgagggcaaacctcttcctccatgcctggtaccccaatcaccacctccccaagctgtcatttgcactaaccactgtctcttttttggcctttaaaaatgtaaattcttttggaagtgttcatatattaggtactcaatattttcaacattttttagctcattttttgtcaatatgatgatataagcatcataggattgttaagtgttttgatctagaaagaaccaagggatctagggatgaggaagctgttgaagaagagggcagaagaggcagaggcatgggcaagaaactgtttccatctcacagtctgacatgaacctgtcttattaataatcatggtagcaagggttcttgacaatggtggatctgcctcagatccatcaattctggctgtttaaaacttactgtttgaggattttaaacatggctgataccgaggactagtggggatagcggtttgttcctgcctgtaactgaaacagggagtaatggggacaggctctcttccagcaaaaggaccatgggcaccaagaaacttcttgatccagtgacctcacgtctaggaatctatcctaaggaaataattaaaggcacacacaaagagttatctaccaggactcacatagtgtttgttatttacccaggtgaaaaaccagaaatcccctaaatttccatcaacagacagatggtcaggcataatttgatgatccatgtaatggaatatgatggctggcatttaaaaatcacattgtagaagaatagctaatatttgataacctgtgaaatgctaatgagatagctgagctgaacaattagaggacaaggcaatttgtatacgtgaatatgtatatgtgtgaatgtgtgtctctgcactcatatgtatgaatctgacctgaaaatattcatttatatgtaggaaaagaacattgaaaggaaattctctaaatgttaacattgggtatctctgaattaatagaattatgtacagttgcagttgttttatgtgttatcttctgtaatttcctttaaaataagtataaatgtataggcatttataagcttataaatgcttataaatgtataggcacatagggattttgtaaatgtatatacagagtttattgagacatgggggaaatcagacaatgtggaaattagtaaaactagacagtgctcagtcttagactgaagtcagaaaaatgtcaatgggatttcttttttcagaagaggaaaagtcaggaataatatagatctcatcaatattttctaccttattgaagtcaaaaggagaaaaaattgggctttcagctttgtggaccaccatttttattttcaacctctggaaaatgtttttgggcaatcctgcatcttctctacatgtgatctgtgagctctctggatcacaggccagggattctatcaagcaacagggccccaaggcctccttggtgcttcccctatttgcagagaggaatggatttggaacattgaaaatggtatccggatggtgttaagtttaaattggaatggcccaaagtctctttaggaaattgcctggtgaaactcattttatttttggatttttagaaatataattacataaaaaagctcagaaatgattacctatatgcttaactacaattataaaatactttgtatacacaaagtgcataaatgtaagtgttaaacagtaataaaaatcagccagatgtggccaccacagagaagataaaatggactttggatttttccccatttctaattttccttcttagtggcaagaaggtaaatcctccacattgtgcgatgtggtgctgctgtgggctgttttgagaccccatgggtcatgctttccaaggagcaatagcgcctccactctcctgggcactctcctgagcactctccctctcctgagggtctcctgaccctctcgtcagagggttgatattgagtctataaacattattgatttaatgatttagaaaacttgttttatttgagttaaaaagccaatctcatgcaaaaaagctatgattactaggttttaacccattcattattaagtgtgtatgtatgtatttgtttttgtgacagggtcttggtctgttgtctaggctggagtgcagtagcacaacctcagctcattgaaggtttgacctctcaggctcaagcaatcaatccttccaccagccttcccagtagctgggactacaggagtacaccaccacacccggctaatttttgaatttttttagagacagggttttgctatgttgcccaggctggttgtgaactcctaggctcaagcaatccacttgccttggcctcccaaagtgctgagattacatgtgtgagccactgtgcccggctcattattgagtatttattaagaacttactttgaactgggtgccacttacagtaccaaataaaacaagatgaaaacatggcagccattcttaaggagctcacagtctaatgaacctcagtgaatcaatatccacaatctatctttatgttttccatttacatctccttagttaatgtaagaaaaccaaggatttttgtttctttttttaaagcaagagggtctcctccaggctggagtgcagtgactccatcatagctcactgcagccttgacctcctggcctcaagtgattctcccacctcagtcttccaagtagttaggactacaagtgtgcaccactatgcccagacaattttttattatttttattttccatagagatggggtcttgctatgttgcccaggcttgtcttgcactcatggcctcaatcaatcctcccaccttgctgggactacaggttggaaccaccatgcttggccttgttttcttttaatctacattgcatgactgagaaaatggaagctcagggctcaataatgggagggaggtcaccgtctccgtaacactcagctcccctagaccaccccagggagcatcagaaaacatctggttgtttggtccactcactgtgacattttctaaatgtacctagggagttacagttacagatttatagttatgggaaacaggggtgggaggatctcaactataagccagtttgagcagctaaaagcatgctaattattaaatctcttgggcagagagattcttccaaatctctctaccttcatctggcaaagttaaaccacctactttgtaattctctctcctgccctgctgacctctactggccgttaagtctctgaggagagtcctcaattacctgtgttctccatgggaagtggcccagtgctgcccagagatgacgcccagcggatattcactggccccagacagactccttttctgacttcccagaggcatggtgctggtgttagacacaactcaggggcccatgttttattcatccacagaagtcttattgtctatctcacaggtgaatgcttgaatgagaaagaagcaagcaaaaatatttttcttaaaatttcttcctttgttgtgcattcgtgatcagaaagaattactgttatttccctaggtgaatgtttcatagcatctacagcatctctacctggcctgggatcctgtaagaaaggcaatgcatcagcatataaaatgacatattctcagtgatcaggaacgaaaattgttcctacaacttctcatggaaagctggttgtcttttaacatcatgtgtcctttaatgagggtgaccatacatgccggttgtggttgtgcagttacttccttttccacaagctcctgatttaaatgatacatttatggtggtccttccatatggcaggcaggccagtgtggtggaggaccatcctgcccagtgcaaacctttgctttgcttcagttgtggctgctgtccttggagagcttcctccttgccattctgattgtcgtctcattccaaccccttggtcctgatttgttctgtttggtcttccaatggacgccattaggatattttaaatgtgaactgcttgtgattttaggaaatagaattttctgcctacaaaagcaccaatgagactctgaatgtttttttgttttgtttttttttttttttttgagacagagtctcgctctgtcacccaggctggagtgcagtggtgcaatctcggctcactgcaacctccgcctcccaggttcaagcaattctctgcctcagcctccagagtagctgggattacaggcacccaccactatgcctggctaaattttttttttttttgtatttttagtagaggtggggtttcaccacgttggccaggctggtcttgaactcctgaccttgtggttcacccgcctcagtctcccaaagtggtgggattacaggcgtgagccaccgcgcccgtccctctgaatgtttttcttgatgagaagctctgcatgaaatagcaaaggtggcctgaatctcctgctaatgcaaaagtgagcctaaaagtgtcatcccatagtatttggtctcctgtgcgagtttctgccatgcattttcaattgagttggggagaagaggtctttcttatggtgtcttctaaaacttcagccttttacaattcagacagacccttaggcaaatttccttgtaagatttatcactgaatcttgggcacattcttgaatctagcacctgagtgctgggaacacatacattatttctgtgttggtgattctgtttcctaccctgtctctttcaggtctcactcttctttgccccagatgtccagctccaggtctaaagattcctgctttacagaaaacactcctttgctgaggaattccttacaggagaaagggtgagatattttccccctcatatgaaagtaagagtttctgagcattgcacctggcatgtatgctggagaacttgagacacgaatttttattggacatgtttaacctctgccagatccttgacaatttattgtagtagatgttcatgattcnggtggttatattctgtggatattaatttccagatggccttgagcataaccctgcagcaactgcacagcacacacgcacactcatgcatgcacaaagctctgatgggctgtcttaccaggctggggtttctcagctaggggtgaggttggcattgtctggagacacttttggttgtcacactgagggctgagatgcttctggcatctaagggtagaggcaagggatgctccaaacattctgcaatgcacaggacagcccccaccacaaagaattatccagcacaaatgtcagtagtgacgaagttgagaaaccctgtatatgtgtttcacaagaaaactcaatttcctgcaaacttgcaggtcctttttgggcacaaatcagggtggttctggaattgcctgaggagagctgtcctggagggcaagttacagatgcttccttctgggatgaagggccttgggccaggcctgcagcctcaatcttcttttctttctgcaaacaaaccgccagaagcctgagccgcctgctccatgtttcctggctccttgaacgtcacaaacttggtgacattgtcactgtcaaactgaaataataaaaaatatcagaacccagtttaaaattatttattcaagcacaaagctgaggatagccatttgggaaacacagaatccaaaggaatgggatcagtgctccaaagctgaaaagttaaggtcttattcttatccatataggcagaaaacaaagaaatgtagaaggactacattttccatacatggctggtttatgagttacagcaatttgattagttacagcttcccccctcccccaatttaaaagagtatatttgacattccatgttagacaatgtgatagtcatgaggtctttgtgtgagagaagaaagaaggaagttaatctgtcaatgaagatcaacagtgaagagggaaggggtcttctctcgtgcccggtagtcttttacaacattttacaaaacaatgtaggtaaggaaaaaggcaaatctagaatcagagaaaaggccacagctgccttttatgtgactcttttcataatcacattcttttaagactcaaaataatttaaagtttcaacagctttgattttgaatcacttatttgcacatcatggattctcctttccctgcccactgatggtgtgtacctgcattgacaggagggctgctgtgtcttcttcactcacctctgagcttccgaggagctgcctcctctctccccagcccagtctgcagccagggcagggaccagggcttcgcactttaggggtgcttgcatgccatgtgcattcctgtcctcagcctccaaatactctggctcccgggatttggatggtatgcagccatctgggtttatcatttctcagtgcagggatgatttgttcacatgaagcccttgactagaggaaactccttcactctctggctctccaggcagtcagtcctactcctgtcaagggcattcaaatgtcacttcctttgaggacccttagttgtctctgccccacccaccaagagtcagtgcttctcctgtgctctcaaacactacattcatgcccttacttccaaactagcccctgtgctatctatggttatgttggccagcctgtcccctcttcatcgtacatcctggcacctagtacagtccctgccaccagcccctcagtgactggatgggtaaggagtgtaagctgaggcacttccactgacccagctgcttcaagcttctgtactggtggataactgaattctcctccattgctcctaatcaataacttttaagacaaaaactttacgcacctattcccttaatgctttctcttgaattacttggtaaattgtgaaggcctgtgacattttagaacttgcaattcattggaaaaccattaatgtgtaagcattttttctggcatgcagagcagagacatgccctgggaggccgagctgggcctcatgtcacaaaaaccatttcaagggagtagaacatgggtcagctttgcttacaaaacgttttccttttctctttttgcatgaagctaattaaggtattggtggtaggaatgtctttttcatgctttacttttatcaactttattttgttgcagttttaatttgatcaaatggcttattaggataatatccattgatttatatattttcagaagtattcttttaagggtgttgacagcaggaacgtgtggtacaaaggtcaaagcatgccctgtatctgaactgacaactggtagccactcttcacagatgtttatttaaatttaaattaattaaaattaaaaattcacttcttcagttgcactagccacacttcaagtgacaaatagcacatgtggctgccatattggacagggaagcgaacatttctatcaccacagaaagttctattgcacagcactgctctagaaggcaatgacattaacttgcttccctctgtcttcttataagaaaaggtttttttttgttccaattttgttacagttgtgtttttttcagcagttggtgtgatattatttctcacacacctgagcattttccagtcacaaaattgataggattatcgactattttcaaagtcatgtgttatcttgttacacattggttatacacagcctaattggcatctctacgcttcttctgaataacattttttccttgtgaaccacttctaaagcagtcataagtgttcaggagaatcacaatgccccattgagctggctccattctagtgtgtcacagatcacatctgttaacgtcagtattgtgagcccatgaatattctatatgatacatgaaaattctggcttttggtacaaacttttaagagtcaagtgcatctaaactgaaggaactgatcaggtcagggattcaaccaaaagtaaatggaggctctgtacagtggctcatgactgtaatcccagcactttgggaggccaaggtagtcagatcacttgaagtcaggagttcgagactagcctggccaacatgatgaaaccccatctctactaaaaatacaaaaattagttgggcatggtggtgcacgcctgtaagcccagctactggggaggctgaggcaggagaatcgcttgaacctgggagacagaggttgcagtgagctgaaattgcgccactgcactccagcctgggtgacagagcaagactctgtctcaaaaaacaaaacaaaacaacaacaacaacaaaaatcccaaaagtaaacggatgtgttttcaagtaattctgagaaaagtttatgattccccttgagtcatctagatataggccccatttttggcctgtatagtcaggtacgaatgttccctcttcctgctcatgcttctgtggatgttgtgtgggaagccaggtaggccaccttccctacagctccactgcagaaagagatctacacagaggaggaaaaactgacaccactcaccctggacaagtctcccagatctaggtattgactactggagtgcatgcagtgaaaaagccaacgctgaaatcagcgggaactggtctgagccagaaacagctttcttggaaagtcccaaactcagaaaaagctggtttcttgaaggcccacaattcattttgaagactttaatgactccagaaaatttcctttgacctaagtgttctgagaggtcacaaaaaaacccattcccaccagtatgagagtgcaccactgtctgtggtcctttgaaagaccagggttgattcggtgccatttcacacagtcagaactcagaggaaagcttgctttgtagccattactatttcaggagagataaccacacctctcttgctttccaggtcacggtgcatacctgtttaccatccagagttcatcactgctgaagagtcttgggaagacagctctgctgactgggagcgaagatacctgctaagcagggaggtgtctggtctgtctgcatctgcctcctccgagaagggagaccttctggacagcccgcacatccgactccgtctttccaagctgaggtaggcggacttggggtgcccaccctggcagcagcggtggccgcacatcgcgtcctacatggcccctccatctttcaaaccagcagcgtgaagaagaggatgagttttgtctcatctggccaggctgcacttttcctccaaggtgatttatttttacctgggcctagggagacatttaagacctcctgcaaatcatgcagcgccggagaggacaaacctaaatgattgacacagtacactcctctccttcctgcttgtgtggctggggtcttcatggccattaggtttgcagataggatctgtttgcttcaggcgtccccgtggcgttttggaatttgatatacctttgtagttattgacgaaggagtgggtctggcccagcgcacagcctgaggggtggggttcccttctgtgctgtgggctccagaaaccttgttaaggctggaaacattttagaacttacaatccgttggaaaaccattaatgtgtaagcatttgtccggggcacacggagcacagagccatgcttggggaagcagagttgcatagagaaagtggatggtgcacatgcctacgggagcaatgggtggggaggggatgcgcatgcgtagggggacggcgggcgtgggagtgggagtacgcatgcgtgtgtaggcctagggcgcgcatgcgtgggaggccgagcgtgtgcgcgggcagtagcgctctcaccttactggcctatttatctaatgggtttcctcccatgcgcccgttcatttgaaagggttcttttgagagggacatgtttgaaagcatcatttccaggacagaacaaggttttggagccgggaccagtgggcttccattctggatccgacctgaagtcgctgagcgcccatcgcagggccttgcctggccacgcgacggtaccctgtcacgcgatgccctcctggctttgtggcctctcacgggcctacactaagataatatgtgtgaaagccctagaaaagtgaaaaaacactacttagtcatcaaatattagcgtcaccgtgtctctgtgtgtggggaccagtcttttctgaagatgctcgcggttggttggaagtgtacccgcctgcacgctccaagtgcacctcccggggtgcgaagaggcccgcctcagactccctgaggtgcgtagggatccgctatcctatacatcttcccaacaatcctgggaggtacacggagggtacctcaaggaggataaggcttttgcccaaggccacactgagccaagccaaggggcagggattcgaccctagatcccccacatcgctgcttgacatggagctgtctcttcccactgtgactctcaacggcctgtagcttcttcctgatgagaagaaggggtctcagcccccctcgtgggtgcaataaacatttggccaatgaatccgctatgagattatgtgagttgggtgaaattgtgtgagtggggttctggcgccatgggtcaacaagatggcaaacgctgacactgttcatgccttttcccagctggacgggtaaccactcctgaggatgccgtgtcctcagctgtcccacaacatggaaaaatagaatcaagtacatttgagacttttgcattcagtacttgttttatcttctatgattcatggaatatttgcctttgagcttgccactgaactaaaagacgttagctccattctttataacatgtctaaaaagtaccatgcgtgatcagtgaagaatcttgtaaaaaaccttttattttgggttgtcagctctgctgcagatgtcagttacgtagaaagaaatttgtatttagaatagctcaattaatgcttcatgctttaaaaagaaatgtcattttgattcctatttaagtaggagctgttgaatcgtaattgggaagcgtgaactgattattcatcaaattcattaaatctaagagaatgcaaaacaagattttaccattttcaaaggatcagaaagaaggttttcaaagacagatgcaacttaactaagtgaggagagtattaaaaagatgttccaacatagagtttcttatttcattctacacacatacatcaagcatgggctatgtaccagcatccttccatgtgtggggacaaagcaaaaacgctctagtgcctgccctcacggagcagccggtgggagagcacaacctggactgggcagtgatggtgccattgggtgatggggtctggctgctgagtgagcagagaagggcatgacaggaggactgcagtcagggagcatcccggcaggcaaaggccctgtggtccggtctgggagcagcaaggacgttggtaggatggaagggcagcagagtgcaggccaggcccaggttcacatagggccttgggggtcatggttaagaaatgggtaatggtaagggggccgggatggctttggaagtccttggtaggggctgagtgtgtggcttgatggttaattaagttatcgcctaaggaattcttaacagactgctggtacaaccagtaacggcatagcaatttctttcttaagttatttgtttttgtatttgatgatcaaatctgtattcctacctttcagaaaacttaggggaaaataattgataaatatgaatcagagagacaagataaggcattcagtttactttttttccaggaaacaggagcctttaaacagctatcaaaaagtctcaaatcttgaactttagtttccccaacaacaagctatgtgcaaacactttggttaactttgttctcctctggaacctccaccatgctcctttggatggggctgtgggtttactggtcactgatatgagggtgttctccctcatatcatgttatggaaagaattcaaaacacatgctttgagatggaagttactcaaggctgcagaaaagtgtctgagtctgggcaacaggactgctgcccttgccactaaggccctactttttctcttgcaggcgctgtgtgcagtggctgaaagtcatgggcctgtttgcctttgtggtgctgtgttctgtgagtaccttagctgccccagcactactgttgggtccgtggaagccctgtgtgcctttggctgtatagcagggggaacctgaggtgtggggctcagtgcctggccctcttcgcctgattctctgactgtctttggaggagatgctgagggttgtggggcagcgggctgagggggtcgaggccgcagctgtgctcctctgctgtggtcccagtcacacggcagaagccgggcagcatgttgttgccatatggaaggtcgggtagctggctgtggggctcccttccccctcgagtggcttaccacttccctgttcagccctggacagtagcactcttcatgtgtgttggaacacatctggagatcgtggatagcccagagtgtctcagcacccctttgagattgtgccctgggcctctgcccagcggtaagtgttgaagctctgaggtttgccccctctggggaggtgtctctgattttatttgcccagacatctccatcctttcaaatacatgaacattcacaacagactcattctggagccaaaccaacgtgagatgcccttgtagggaacagagtgtgggaacgaggggagggcgagggctgctctggtgagcccatggcagtgggcggtgctgttcttcattggaggggtcctagcagatggacccatcaagggaaaggcacaggagcccgagcagggagccagggctgcagagacacctctgtgccctccgaggcgacagtcacaggtcccactgccagccttggtgtgctttgtggcctgatgtagcctgagccagggtcacatagcggcactcaaaatacatttgcccaatgagtgggtgtgtggtctcctgtctggttgtgtgtctgtgtgtgtgcaggtgagtatatggtctcctgtctgtggctgtgtgtcttcgtgtctgcacgtgggtgtatggtcccctgtgcctgctctatgtctgtgtgtgtgcaccagtgtgaactgtgtaggttntgtgtggtcccctgtgcctgctgtatgtctctgtgtgtgcacctgtgtgagctgtgtaggttgtggtcagtgaccatgatgggttgtgcctgtgctttgcggagttattttgggtgagtgccacttttgagtgttgctccaagatggtgtgcatgggcagttgctgggagaccacagtgggtggtaggtgctgctgtgatgggggtgtgactgtggttgtgggcaagggtgggtctgagctgtgtttcatgatgtgcaccagcttagggggtggtgtgctctcccacgcagcctgccctggtgacagggtcccctgtgcatgagatgtgtggctgttgctggctgtttcgtgacctgcacgcgtggcatgtgtgttgtggctctgcgtgcgtgcaggaatgtctgtggccctgggtccgctctcagctgtgacatgtggacagcagggtggtgtacgaagtcagtgctgattgcattgagctgagtacagtcaacttcttaataaccaacccatgagggaggagatctgtgacccagagaaaggaaacctatgctagaaatggaaaaccaattacattgagctctgaaagcatcacgatttgatatttttggctaccaatttgcttccccacttcctactcacatgaatgtgtgtttctgaagccctgctgctcagcagggcctggcaggtgctctgagatttcaaaggaaccgggcagggtgggccaggtctcccctggtccccaagagctgacctgagctctgtgtccagtcttcagccttcttctgtgagatggagtttaggtgatttgtggagatatccaaaatagaatttgaggaatgatttgaacttctataatctcatgttatcatcagtttaatttactttttgatggtgtataaggtgctttgcaaatttcacaaacacctgctaccacaaacacatgctctaaccatcacaggggtcatatgcctttattctccattgtgagaaaaccacatttatccttcttcgatgatttaattttatggccaggcatttaatccttaaatttggcaggtatcaataatcagggcccattgtagctgaacactgtaatgaatcagaatattataatatttaagacaaagctattcagagtaagctggcgcgtactggatgcacacagtagccccatcatcacatctgttttcgactgttatcaaaatgatttataccttactgctctcataccacacctctgtcattcaacgtttctgattgttacagattttgttcagcctatatccggatcaaggaaagctctggcagctgttggccttatcaccgctggagaactactgtatccaaaatccactctgagatggccagccgcctggctgagatctgaaacacaaggagacacttgcagacggttgtgactgctgctgaaggccacggcacaggccattaccactcgaattttgtttctccaggatgtctgatgagagatggagtctcaggacagaggggcggggagctccagggagacagtggcggggttggtggtggagctctccgagtgaggaagggggacagcagggcacattccagccaggacctggctttccctagctccccgatactcctttcctcccccgtctcttttgcgttcagcgtgacccatcttccagtccctgctgtcctggctgtgtcaccttgctctgatgactgctgtggcacctcctactgtgcttgctctggccttcttgcatgcctcagaatttttagttagaagtcatacacatcctgtaggatagtagatacagaggccagtggtgtttaagcttggagatgagcatgccttgacttctgcaggcattagttggagggttcatgtaaatctagtgagaatctggctgtgttgaggtttgcggttgctgtggcaacctgcggtgcactagacactcagaattaccgggcgccctgccagctgtctgccagaccttgctctatgcccacccctcccactggggtaagagctactttttcccctcctaccttctcatggctgcaggaattcccactgcgccctctggctgccagattagatgcgcttcccaagcaaatgaaggcctttgctccttaggggagatagaggcagcgggagagggtgaagcttggcatcactgggggatgctttcccgggatcttccccaggcttcctgtcttcctggggagcgtccgctggggttcctggaggaaaagcctgcaagaaaatgtgaacacctccatctgtggctctcagaggctcccacgctcaagcgagcccacacttgaccttgagcaatgtctacattttctggctgaatcccgcctgattctgaagtgtggggctggcacctgtcccagggaagccgcctcttcctacagtcacctgttttgctctaggtttcaggcgagttgtttctgctgcagccttattctgggatcaggagtgggcggttaactgatgtccgcccagccttttctgggtgaaagggtgggagggctgtttctcagctctccagccagggtccagagcctattttggaatggacatggtcattaaggtgtctgtgcatgaaggcccctgaagcccccggtactgctagtgcggcgggcatccgtggagggtcctggagaggtgggaccctccgatgcagtgctctgatcaggcaaatatttttgatgattattatttaaaaaggaattaattcagttagctaaatggcaagtgtttttttctttagtctacttacttgatagcctcagtgaactgaaattttaggaaactggcttgctttccttgcagttgctgtaatctgttgcatagtcttggtttttgtagtccttctggcagtctcactacatcttcccaggacaccctctccttagccagtgacctacccagcagggcaccagcagccttccagaaaggcctggcacttgaggctttctggtgagccgggggcacactggtcacagtttgtgcttccctctgctcagtggatggaggcacccacagttttagaagcactccacttccactggggtcagggcggtgctgatgtcagctgagtgcgtgtgcacgtgtttgtattttcttcatcactttaaaaccgtgcctgagctgtaaagtatctccatgtgagagaaccgaagagctgtgtgatgttgacagactttgtttctcattcttgtgcctcgacctctgcattacttctccaggatgaagaaagccaagacttgccctgtgttcctggcccccctcatgaagttcccaggacatgccaccctcctgggcaggactttcccgcagggggaaggggagatagagcaaccggctgccaggctgacccaggaacctgaagggggaggctggatcctgtccagaaaccgtcctcagtgggactcaggcaggagggggagatttcggggaacactggcaccaaacttgatcagtcagtagagatcccaggcgagcacagcagcttaggtcactaagatgagatgatagcctcagccctctggtcatcccacccaggccccagtgtgtcccctttattctaaggcattttgccgagctccttctcgagcagcctgagtgcaccaggccccacgcaggaccccacagcctgagtccctcccagcagggggcagggcagcctgcctttcttggcagggggtggggatgggtgggggcggggagctgtctcgcctgctccctgtgtggccttcgaatttggatgaagagggagagagagagcctgggagagatgaaggccgcaggggggaagacgggtgctgcgtcctccagcgcagtgggtcaccagccacgatgaggggttgatttgagcctccagcaggctccttggaaaagggcagtgttcccagggattaaccacgctttccggaaactcacggaccctctctttgtgaaagctgagctttgtgaaagctgcaggcctgaggcctgcctggggaggaggggaagccagctggaccctgccccccacaaggtgattccctgagaaagggcgtgcagtataggcgtgaggtaggaggggcctcggcctggttggaaaggcccacagcaatgtcctcagggctgtcttctgagcaaggagctcgaggcctcctcccggccctctggcctgccctgtggaggaggctgggtgaaggacacccagggtgtctgctgtgaggggaggagcttctggagaaagcaccactctcctttagccggtgaatagcgaagccacctttctttcggaacctcagtgtctcccgcagcagccaggcggtgtcggttcggtagttgcagggtctatttcagaagcctgtaattgtagcacctgaagttctttgtccctgaattgttgtctgaaggaggcctgtcaggctcccagggcactgggcaaatgaacagaagccagcaaacctctacaaccaggtcagttaagggcgccgtccttgtctcccgctctcctttctcttcctccctcccttcctgctcttctttgctgcgtcctcttctttctcctctccctttctctctccctcccttctccccattctccctattctctccctccctctttccccatccctttcattctctcctttttcccatgtgatgcattttgtatcacacccagcgctgcatcctgggctctcagaggacatggaggagactgtgagattcagaggggaggagaaaacactgtttccccaccctcctagcttctccaaccagggccctgcagattagacacgaaggacaggttaacaagaaaaaggcatactcatgtatttcatataagcgttgcttgacaagaaacagctgagcttggtgttttgatgctaggtttgatgaagagtggggtcctgaaaggtgtgataggacgagagcacatgagcaagcgcaggaaacgggccgggaggggccctggcgaggcctgtccattcaggtccctcttggcctccctccatctttggagctaaggatgcaccctttccctggtgtggggggcacctctcacaagagggtcacgacgatctgcttcaggggagttaggtcttgaatgagggctgagatgtgggtaataagaaaggcaggaagatcgtgttaatggccaagggcgtggggcacctggggaaacgcatttcttcacacactgtcagaggagggtgtgcgtctggcgggcggcggggacatggggtttctcctgtctgccttgtggttctccttgacactctccgagccgtgaaccttagcagccacgtggactccacgctgctgcaggtggacctggcaggggccctagtggccagtgggccgagtcgtcctgggagggaagagcacatcgtggtggagctgacccaggctgacgctttgggctccaggtggcggcggccacagcaggttatgctgataatttatttgaaaggaattgtgaaatctcatttcatctcataataaattgtgtttcctcttgaatggatttgatggggagccacaggcgaggacaccattcttagtcaattcattggctcttcttatcttttgctttgtctttgaaattctctttttaccatttctctatttatgaaactcttgccatttcagtaaaatcaggcttgcaagttctttattcaaaactgttttgctgggccattcaggaaacatacatttgaaatgaaaaaacttttttttttttttttggtgtcgttgaagtgcagttaagtccgggccttacgtcagggttcagaagacacttccacagcacggttactgtgtttgtggacatctgctaagacagtgcctacgttctgagctgctgtatctgtgtaggcctgtgctcagccttgtctctgagccttgtcaagccttcattcacatcctgcaaaggcagccaggaagcggtggctgtcatggcagcccagagcctagactccagaggcagggctccttccacgcaagcctgactcccccgagccctggcctcggagactccactggattatcacggtgacttctgcatggaagtcgtagccctggttcatggatgttccctgttataaccagtagagggaaaccccgcccatgcacaggctgtgtcacctgcagtggagcatctgaagaatgaatgcaccctccccttttcctgccttgtagagcatggtccacagagcaaaggtctcattatgaactagcatgcagtgtcctggaccgtggctgacgcaacaccaatgttctgaaccggctgccctggccagggtcttaggatgtcaacttggttccctgtgtgaaaagcacagccctctggcaaggggctccttggtgatgagcaatgacctttgccctctgacctgggacttgcatggagaagggcaggaccttacacagcctgcggtcccgctgcctccccagcacttgcatattaataacccagattaaatgatctgtatggcacctccctgctctcttggggtggcccttcctaacatgctgatgcacccaaaatgcccacaggcaaatccagccccagaaacatgggaaacccaagagatctttactaaaggatttttccccccagatacgctctttgcaaacactgaagtacctaaaagaacttctgttctctcatgcgtgtgcttctttgctttgaccggtttcagagatcctattttcagtgtcctttgtgatttgtgggcgagattcgcatcttcccattgagggtccccccccgccccccgctccccaggctgcctccccaggtgatcactctcctgcaccccaggggcaagaacatgcaaggcagggaatgaagcttcactctggggcccttccttgcaggggctcctgtgcacaggggtgtggaaggtttgctgggggtgggtttgttgcctccaggttgcaagcagttgcagaagcagttctcaggactcagagcactcagaagagttctccaagtctctagtaacttgtagtgatttcattttttaaattaaaaaaaatttatattagaaaatttttagagtcgggggtctcactctgttgcccaggctggggtgtagtggtatgatctcagctcactgtaacttggaacttctgggctcacaggatcctcccgcctcagcccctaagtggctgggaccacaagcacatgccaccaggcctggctaatttttaaaacttttttgtgcagacaggggtcttgctctgttgcccaggctgatcttgaactcttggcctcaagtgatcctcccaccttggcctcccaaagtgttgggattacaggcgtgagccagcgcgtctgggcatgatttctttttctcgtattaaatcactatttacttctatgccttttgtacttttgtacactaattctgcattttttcttttgaatcctttttcttaaacaaagctctctaaattgtggaaattcccagctccaaccacctgcactagctcctaacatcagagatgtgagagctcaaataaagatgctctcctgtttctttctttctccttttcttttttgaaacaaatacctagaccgagcagtgccagatcccagatggtgtctcaggtgaaaagcctcaccataacttatgctttggcttgtacaggtcactcacaactggacggtgtatttaaatccgaggagaagcgagcactcagtgatgagcaggacctttgaggtactgaccaggtgagttctcagtgagtgaggtgttggggcaggctctctgggacacgtgcgtttaaaggagtctgacctataggacactgatttcggcccacacagcaccaggtcagcatgtgacttggacacggcactcatgctgtgtagacagtgagctcaaaggctgtgggaggacatcgtagccatgggtgtcaggatgtgagagggtcgactgcagaagtcactttgaaacaaatggtattttttggttgacgttctaatttcattaatgtgaagctgtacaatggagaattctaggaaatttaggattcttcttccttaactaatgctgcttcatattcaatcggtactcttgcttggtgtgttagacagctaaggctgccgtatcatagtactacacactgggtggcttaaatgtcagtcatttaccttgtaattctagaggctggaagtccgaggtcaaggtgtcgacagggtcagtttctcccaaggcctctcccctggcttacaggtgaccatccctctgtgcctgtcttctcatctctccttgtatggacacccatcctactggattaggagtcatccccataacctcatttaaccttcttcaccttgttaaagaccctccctctacctacagtcacatttggaggtactcggggttaggacttcaacagaggaattgtttttggaggaaggggacataattcggcccataaaacatattggcctgaacttgaaaaaacgcttcagtgttcgccacagacctgtggtcacttgcaggcttctcgtctgtagtgcgtctccccactctcagggactggagttcaaatagctggctttgctcttagttagcaggtaaactggtcgggtatgttggggaggaggaagagccagttcaatggctggcgtcttctgtgcaggcccctactcactgttcattgtcgggtggtgtcacaggaaggctgaggggcctgcttggaccagtcgggcttggctgcagggaggctgcatcctatgtctcacgcccctatgtctcacgcctgctgcctgtgctcactgctcttccagctgtgatattgggcgttgggctgaattgttccatttggactctggttaattccatggctgatacagagggaggtcccctaactgttgaccttgtgaacagtaaggtcgttgtttcgttctgcagagagacggtgtccatcagcatcngggcctccytgcagcagacccaggctgtccctcttttgatggctcatcagtacctccgcggaagtgtagaaacccaggtgaccatcgcgacggccatcctcgcgggcgtctaygcgctgatcatatttgaggtaactttcacacctgctcccccgatctgtctgggcccacagtcagggaggcttgagatccgtgagacactctggatgggctcagtcctgactccttaatcaaactggactagtgtcatcattcctaaagattagcgtgtccctctctctaggtagaaagggaaccatacaggaatatttgctgaatcttggcaactgacatgagaaggatggactttaggagcagaagtgtacctgagaaaacagaatgtgcatacgattttctactctctctccgctgctcactccaagtgtgaccttgagggaacaagagtcacagtctcctctgagactcagagtctgcacctgtgtgatgggtgtgctcatttgcgcccacctgcaccgtggggttgtgtgtgtgaggggacacggatggcctggggctgtgtgcccggagggattatttgattatctgttccgtctaccaacttggcttatgggcatttccacatgtgatcttaagtccagtcaatgttatgtttctgggaagttctaagtgtggctatgccttcaatagcacgaagcaatgtgcagacccttcctgggctgggcaggtccgttgttgctttaactatgaaatcaaacttaaccacaacacggacaggagcctggaaggtcagtgcatgatgtgaccgttagaggcgcgtcctagtgagcttgggataggtctgagaaatacctggggatgttgaggagatggcaggctggaggagtggccaggaaagttccagaactttgcttgtggttgttgagtacacttgctgaggaatgatgaccccagtaagttgagccctcacctgtctaacaaggaccactcacaggattaattgttatctcttacatctcttcagttctagaacagttttgttccctccattttctatccattttcttttaaattaatattactgttgtttcacggttcccatgaccaccctgtgatttgacacaggaactcgcaggctcaggggcagctgtcctctgggctggggtttattgccatgcccggcagtggaaacctgctgagcctggaggaacccaggagtgggcttctgaaaggtctcctctcccaggtgggcccacacagagcacgcccctccctccagcagccagaggcagccatatgcggtgtttctgccctgggcaacctgttggagactgagtttttgtggaggccggttagatggtcaccctcagcttaccaagatccctgctcccaggaagcaagcaggtgcgcaccatttataaatcacattttatacagtctgggcatgcaggtaatacagcagaacacactgccccaggcccacaagacagccttctctttggtaatgagggaatagtcccgaagctgagtacccagaagccagccaagggcccttctaaaggtgacgttaggtgaaatctttactgcgccaccatctagttgacaaatcctattctgttgttctgtagaatattctataccctgattcagtgctgggttcctcatgggattaattagctgctctatcctatttcctacagactacaattgagatctgaagccttcaggttccattttggggcacctgtgcttcacaggtgtgcaggggtctggcctgtgtccaggaggaggaccctatgtctggatgtcctgctgtcaggggtgcggagaatgctcagggagttgaggtggtggagaaaggtgcccagctccctgccactttttctcttaatgattttaatacccaccagggcccactgcccgcctaagataaatcctatttctgtaatgatcaactttcttagtaatgagctcttcccttagtaacttccagtggtgtccactgaatttatttagtttccctcttccccttttttactattattttgcaattatagatttaataaattcaatgtgctttaattagttacagtcattaattaaaaaatacaatacaatgccaattatttttaatgggcttctctgttattctaaggtttgttcactttttttgtaaaattgttcaacctttgaaaactacataatttgcaaagatttattttcattaattaatggttagtattatttgtcatttagaaaaaacctctccttctctacaaaaagccatttctagattttaaaagtcctgtactttgattttttttttattacggctagcagatatttaagaggccagttcgacatggtttccacccttacagaaacaaaaagcagaggccaccacacagaaaccagccacacatagaagggagcatggcagggtctcaggaagggccttggagggcagtccctggattccatgagtagtgtggcagcccaagacctcccagaggctgcctccccatgcagcccatccgttccctggcaatctttcagtaggtctccctacacggcttgttctacacatctggtggtccaaggcccttctgtcatagctgtccatgtgcccctgcctatgacagggtgtggtctttctattggtgtgtagtgatatcttactgtgctttcaacttaatttctctaatgatgataatgttggatattatcttttcatgtatttatttgccacctgtctatcttcttcagcgtgatgtctgtatgtgccttttgcttattttctaattgaattgtttttaaaaatgttgagctttgactgttctttatatattatagatatacagactgttggatatgtggtttgcaaatattttctcttagtctagtttataattttttttccttttttttttttggagacaaagcgctgggattacaggcatgagccacagtgccggcctttttttttcttttttgagatggagtctccctctgttgcccaggctggagtgcaatggtccaatctcggctcactgcaacaccatctcctgggttcgagtgattctcctgcctcagcctcccaagtagctaaaactacaggtgcgtgccaccacacctgactaatttttttgtattttttgtagagacagggttttaccatgttggccaggctggtcttgaactcctgacctcaagtgatccacccacttcagcctcccaaagttctgggattacagtcatgagccactgtgccgggccagtttttttctgttatagattgcggtttgggtgtcaagtctgagaacttattgcttagttgcaataattccagagtccaaagattggttttctttttttttttcagttttacttttaagaccaggatctattttgagttagttttattattattattattttctttgagatgaggtttcagtctgtcaccctggctggagtgcagtagcatgatcacagctcactgcagcctcaaactcctgggctcaagtgatcctcctacctcggtctcccgagtagctgggactacaggcatgcaataccatacttggctaagttttaaaattttttttgtagaatcagggtcttgctatgttgcccaggatggtcttgaattcctggcctcaagagattctcctgctttggcttcttaaagtgctaagattacaggtgtgagtgactgtgccaggccttgagttattttttgtgtttgtgtgagagttttaagtgaaggttcatttttaaacctatggatgtccaactgggccagcatcatttatcgacaagactacccctcctcagttgaattgcatttgctccttggttaaaaattaatcggacatatttgtggggtatctctctgggttctctattctgtcccattggtaatgtgtctgttcctctaccagtaccacactatcttgattactgcaggtgtaagtttggacactgggaagagtgattcctcacacttattattttttttcccaaaattgttctggctattctgtggccatttgttttccaaatacattttcccctctttgtcctccagctttattggaataaagttacatttctattttctaggacttcagttgctttttcatgtggtgctttgacatccacattttagaatggccttctagtccctaaacatagtatttattttggtcttctttgattttttaaataattttcatgatactgatcttgtacatcttttcttaaatttatacctaagtgtttccttttctttggagcaattgtaaatggtactgagtttttattttgatttccacctatctattgtcagtacatataaatacatttttctgtgtattaatcttataccttgtcattttattgaatttacctattacttctcagagtttttaaaaaataaaattattgagatttcctatgtagacaatcatgtcatttgcaatgaggacagttttatttcttcttttccaatctgtatgtctttaatttccttttcttgccttactgcagtggctagaatgggaatggtaagactggcattgttctcaatcttaaagggaaagcattcagtctttcaccatgaagtatgacattattagtttttgtaggtgctctttatgagactgaggaaattcttttcctaatgtactaagaggggttttttgttgtgttttttcttttcttctctctctctctttttttttaaaaaccataattgggtgttgagttttgtcagcatcttttttgtgtcaactgatgtgctcatatggttttttttcattagctgcttgagatggtggattacattgatttattttagaatattggactagacttgcatatctggaataaatccttcctttctaatgtgagcgtttattactataattttccctgtcagcactgctgtagctgcatcttacagattttgatctgtagtgttttcagtttcagttagttctctctaattcttacatttccctgagacttccactttgacccatagattatttagatgtgtgttgtttaaattctagatattatagattttcctgttgtctttctattactaaattacagtttgattcatttatagttagagaacttacactatatttaatcctttaaatttgttgactttgtgtgtgtgtgtgtgtgtgtgtgtgtgtgtgtgtgtgtgtgtgacagaatctcgctctgttgcccaggctggagtgcagtggcgcaatctcagcccactgcaacctgcgccttgtgggttcaagtgattcccctgcctcagcctcccaagtagctgagaccacaggcgcataccatcatgcctggctactttttgtgtttttagtagagacgggcttttgccatgttggccaggctggtcatgaactcctggcctcaagtgatctgcctgcctcggtctcccaaagtgctgggattacagatgtgagccactgtgcccgggcattgttgacttttttttaaatgactcaggtttatggtctatcttgatgaatattctgtgggcttaaagtaatatgatttttcctttcttataatactagtgtaacttgcaaatataaattttttataggtagtctaagcaacaacttgtgaaaacccaacactgaccttttgttgtgtctgtaacttgatgtggaaggtagagaaggctgcaggggtgttaaaggaatagtatgttctaccttatgtttctgtgacttctgtgtgtccataactccctaggggaaggtccacattatgaggggagggctggatgcaatcgccagccctatgggctctccagcagtggagccaacattgcattattcctaggatctactctaggggtagaatttgccttgggcaatgactcagaagttgtcttgtttcaggcaaagctgcttccccagaactggaggtctctagattctgcaggcaggcatgcttaggctgtgccactgctgtctgcatcctgctctactcaggggagtcttggggtggcttgcagatgcccctgcctgtcctcccaatctgctgctgccagctgctccccagatgctgacactgttgcctcaggctatggcctcctccctgatcccttctcatctgctctgtttgaaatgtttgttttttggtgccgaaaagaaatagcacttgaacataaatttaatttcctcagcaaggccatttttatactttctgcagaaagggcacactcgccagtagttttgccatgagagtataccaaacaaaggagacagggtcatttataacctgacgtgtccaccttactactgtgtctggtttccattggctaggacgggacctcacattttgtatttgttttgattggctagcaacttagaactttttaaaagaggcaaaggcagaggacaacaaaggaaggaggaagtaacttgtagaatgctgagaaaggtaaaaacaaacacctttaaataaggaagaggaacaggctatgagctaatgcttgcttggattagtataagcatgccaggacaagtatttaggctaaattgtgggagctaagaacataaagtacattgatttctttattacggccagcagatatttaagaatgttagcacaggtatttgaataaattttgcttctaagagaagttactatttatttctaatgagatggggaggaagtctttgaagaggaaactctactctactttttacatgctttgtcgtgggcgctccatctcacttattgtgtctgttgttggttgcttttgttcagtgttgattcccagtgccttggacactgcctggcctagagcaagtgctcaataaatattaaacaaatgtttccagagcatcttcagatatttgagacaggtgctaaggtcctctgggtctggtctaacttggctcctacgtggggggcactttccacccctgactttgtgcccagtgatccatgagtgactgaatgggaacaaaggatcagccagggttcccttaggtcttttaatagcttgatgggatgaaattatttcaggaaataccttgggttatttatacttctggtcctacagataatcatcctgattggcactttcttgcctgaggatttggggttgtatctttcatccttgtacagtaggtcttttttttttttgagatggagtcttgcccaggctggagtgcaatagtgcaatctcggctcactgcaacctccacctcccgggttcaagcagttctcctgcctcagcttcccaagtatctgggattacaggtgcgagacaccacccccggctaattttttgtatctttagtagagatggggtttcaccatgttggccaggctggtctcgaactcctgacctcgtgatctgcctgccttggcctcccaaagtgctgggattacaggcgtgagccaccatgcccggcccatccttgtaaagtagttcttgttgaaagtcccaaagaacacagttggagcaatcctcctaactcttgcactttgcatctataatacggctctgggagatttcccaatgcagcattctaaaaattccattatcagagctaaggcttctatgcccttatactgtataaaattaaaatagttctgacacagtcttaatgaacaatatttcacaacataaatgagacagtgcattttctccatatgtcttccatccaacccctggtattatgttttaagaaggattgccaccacagctcctttctgctggaaacaagcgagccctttctttcccttcacccactttatgtaattgtagcaaaatgatgcagcctttgtgtaacatcgtgtttcattgctctgggtcctttcatatttaatttaggagttcgtgtagtgtttggtttaaaaattaactgtgaaattaaattcgagggagatgaatagagaacaccttccatcttccagggagtttccatttttaatttacagaaatgggaagcatatttggagagagaagagctgcatttcaaaacccaatgcacgtatcataacactgcaaacctccaagttaggttttcctaatttctgttcttatgatgctctgcagggctgcaatttaaatctgtagccattggctctgccccctcattcatttctttttgtctgcaagcctcttcttactgctgattcatggaacatattgcataagtagcactggcaaacttgctccattaccttgttccagagatacctctccttttctttcttgaaaaggactccttcagaactgcaggaaaactggtggattatgtaatacactccctctgcttaacacataaactgaattgcagagacacttttgcagttgaaggagtcgggatgggacataggtcttctggccactgggccatgctactcacatttttttctggcaagctcacaatccagcatttcttctcaaagtgagtagccacatcattccttagaaaaatggcaagtattttgcagactgcttgaagtaggtggaccctttccaacctcgcctcctggatggctctctttcgcatgcccttggctgttcctgcacatgcagtgagctctggagcatgctgttgttcgaagccagatccaatgagaggtggggggtggtggggcgaaaggaagccagtgcaggaaggagggccacagtgaatcttgagggctctgatttcaaagaaaatgatgatggtgataaccaccggagctaacgtgtgcggaggggccagccctgttctgggaattctctgtgtgttaatggacaaccccacaaccccatgaggcagactttatcaccacctccattttatagttgaggacatcaagcacagagaagtcagaccacttgcccaaagttccccagctggccagtggctgcctttggagtccacatttctcaccagggtgtggcgcttctcaaggagatgggaattatctgtagccaatgcccagaaggctgtgcaaggtgaacagatgtctgtcatgctcctaccatgggtctggctctatgttttcatcatctatgttgattctgaaaaggtgcagtaggctgattaaatgaccacttccaagatgccacatcctaacccccagaccatttgcatatgggacctcacacggcaaaaggggctttgcagagtgattatgccaatgaccttgtgatgtagagactatctgggtgagctcagtgggtctttacaaatggagagccctcccagctgtggtcagtgggagaggtgactatggaataaagggtcacagaagtgtgatgcgagggcttgattcaccgttgatggcttcgaagctggaaaagaggggtcctgttcatgggatttgggtgttaggggaaggtgagggatggattctcctctagagcctgcagaaggaatgcgttcctgcgacgcctcgatgtaggatgtagcgcacctgctggatgtcttacctgcaggaccagaggagggtgggtttggtgacagcagcccgggaaactcatacagaaggtctctgaaggaggtgttgtgctccggttttgccaatggagatgtgagcttggggagatgtgggcttggggagacgggggcttgggaggcagtgaaggcagggttgaacctaggttcaagacaccccccagccctttctgtggaatcacagccatttccatggaatcagcctccttctgaggaggggaagtgggggtgctgaggactggcgggctgaactgagctgagctgagctacaggcagtgtgagaggagcctcccaagcctgcctgcctcctggacgccctgacaccacggtccagctcgcaggggcagtgcgaggcgaggccggcacacagtttctgtcacagccacattgtgaggcatggtgattttctttgatatacaggaagaaatctggggctcaaggggtggaggggcttcctcccccacagtctgatggccttgtctgtcatcaaaagatcgggctgccgtgagagtgtgggatcaagtggaaggacgttggggtgcatgtgagtgtgtgactgtgtgtgtgttagtacatgagtatgtgtattactgtttaagtgcatgtgaggctgtgtgtgagtcacagcgagggtgtgtgtgtgagaccatgtgtctgtgtgtgattgcatgtgagagtgtgactctgttgtgtctgtgcaagttagtgtgtgagtcagcgtgtgagactgttagtgtgtgggcatgtgagggtgtgtgtcagaccatgtgtctgggtgtcacagtgtgtgactgcatggttgtgtctgtgtataccagttagtgtgtgagtgtgagactgtgttagtgtgtgggcatgtgagggagggtgagtgtgagaccgtgtatgtgaggtgagggcgtgtgactgtgtgtgtgtctgtgtgtgggtgtgtgccagacggtccgggtgccccgctggcgtccccgcaggctcccctgcagcccagcttggaagtcagggcctcggcctgttgctcacactctggttggagaggtggtttccagagcgcgtgctctggggagctgggtggcaggcaagagtgtcccggggacaatgcagcacaccacggggacagctgccacagggcgcctagcaggggggctgagagggggcggagccgcaggggatgctcccaccccagggccggcagcttctgctgtctattgtgcacaggtctttcgatgtcgtaggctgcttttccatgttgaaaacaggagacgatggactgatgttcttctgtgggctactttggtaaatggaaggatcagtgacgtgcagagagacccacaggaaggaagagcagggtgtcttgcagacctgtggggcccagggcctgggtggcagcggctggacggtgtttccgcgcgggcgcgcagcgcgctacgtggacaccagcagagccgggaagggacaggttgagtccctcggtttcgcatcactctcaggtcacctttccccgctcggggcgtaggccggagcatgacgcggtggagggagcaggcggcgcgggcgggttcgtggggtggcccttggaaggcccaccttcagagcacccagatcgaggacgcgagcaggctgggctaggggtgggaccgccaccctcgtggacgtcgagggcggtcttcagacatccgccaactctgagatcccgtttctaagaacccccgagggccgtgtcattgacacacctcgggctcagcgttcggggggcacactgccctgcgcacggctcacgcgctgcaccacggagggccctgctttcccgtcgttccccgcagccagcgtgtagcagccagaatgcaggctttcagactctaggctgtggtttttccacattttactcccctcacccacaaaacagagtaacatctcctggcttcttgtgggagacgaacgcggcagcgcgcgtggggcacggacgggcgtcctgggtggggaccgccagcttctagagccatctttcgtctgaaccaggggtagggacggcacctgttcaattttgtatatttagggatacagtcacgcgaaagcagctttgggaacatctcgattctctaagatggggaagtgtggctggccaatgtgactctccgaagctggcggagttggcagctcacaggctattttattgcggagctaagcttctatagcttctgagcagaaagcttttccatatacaataggaatttgtaccttaggaactgagtactgaaaattcagctctccttgcaggccaggcaggatcacgtgggggaagaagcacagtccgtgcgtggctgacgcggacccgcaggcccacagcccacagctgggcatcatcacttcagaactgaaatcacagccaggaggtttcggatgctggaggactgctccactgatttcctgtggtgccttcgagctctgggatctattgttctgcataacataagccaggctagaaaatcagctcagtatttgtgggcaatacctgaaaagaagatatttgaatttggagtgtataccttctccttgggtcacacggtgtccaaggggccttgcaaagggaacacatcagataacacacaataatgacaaaatatcaacaagaacaaggggccaggaactcatcacatccatgtaagagcagaggaaagcaggccttggtggcagggacagacgcagccctgtgaggctcccgcgtggcctggagcccaccccatcagcccgctgaggaaaggccagcagaagatgattgggaacacaggaacccggctctcctggaccgatcggcagccacaggtttactcctcaaaccaggtacacaatctcctccccaaaagctttcatcctgttaagggctcctgcccccaatgcaggagccagtgatgggataaggaccagtggccacagcctccgagtgggcattctctgccctcatgcaccccacagaccacagtgaggtagggcactcaccatagcccacctccaccctgcagagaaaggaagcaggcggagcaggccctgcagggaggccccatggggtcagaccatgccctgtagctccatggtccagcatctgccacacacctcttagcttcctctgttccagcctcagctcaagcctctacgttccaaagatccaagttggttaggtatattttctgacttccttggtatcccgggggacacccctacttcatgttttgctactgtgcaagcctagttgccatttttctggcctcttgtatcagcttttttggtgcctcctgcccaaccttgaaagtcttgccatatattttagcattttgcttctggagtgccccacatctgaaccaatttctgttagccagtgtttgccgtgtcagtgacctacttgaacatcttggtgcacacagcccactctgttgtacttatggtgcagagtgccgtgagcccggcagctctcggcctctccaggctccaggtcgcctagctggaatccaatggcagagccgatgctgcagagaaccaggtgcctctgtggctcctctgcagctctgcccggctgggcatttgtcagggctgtgcacggcctccgggcatcgctgaggtgcatgctgtcctccagcaccacattctggggctgcagctccctgggggcagtgctgtgagttcaggcagctgtcctgtggcttgggtgccttcatctcttccttcctgatgtgtccaagtcatttggaagtttctctgcaacatttttcctgcacccttcctccttgttctttatttttttcctccttcacagacacacaaggaaagaaaaatatgtgttttttggcaagtagttggttatgttttaaatgagaaatgtagaattaaatccaaacccttccctgaccacactgccccagtgcccagctctggcggtcagctcttcatctcccacaccctcctctccttccacccctgaccccagagctccctttggcctcatataagtgggatcatgcagtatttgtctttctgtctcacttatttcacttagcattcaggttcgtccatgttgtcccaaattggcaggatttccttcctttttaagggtgaataatattctatttgtgtgtgtatgtgtgtgtgtgtgtgtgtgtttgtatgtatatgaaacatgttttctttattcattcatccattgtggacacttaggttgtttctgtatcttggctactgtgaataaggttgcaatgaacatggccgcacagatatctacttgagattctgattccatttcctttggatatagacccagaagtgggatttttctcagtcatatggtagatctatttttaagtttggtgaaagttctatattgctttccatgtggctgtactaatttgcacccccacagcatactagggttcccttttcttcacatcctacccaacatttgttatctcctgtgtttttgataacagccattctaacaggtgttaggccatatctcattgtgtttttgatgtgcatttctctgatgattaatgatgctaagcaccttttcatgtacctgggggccatttgcatgtcttctttgggaaaatgtctattatcctttgcccattttttgatcaggttattgatttttttgctcttgattcgtatgagttccttacatatgttcaatattaaccccttattaggtatatggtttgcaaatattttctgagtctgtaggttgtcttttcattttgttgtttgtttcctttgctgtgcaaaagctttttaatttgatatggttccacttgtttattttttgcttttgttacctgggcttttagtgttatatccaaaaaatcattgtcaagaccagcatcaaggagcttttctcctgtgttttcttccagaagttttacagtttcaagtcttacatgtgagtctttaatcaattttaagtcaatttctgtatatggtgtaggatagggtccactttcattcttttgtatgtggttatccagcttcccaataccatttattgaagagactatcctttccccactgtgtattcttggcattcttgtcaaatattagttgactgtaacatgcatgggtttatttctgggctgttgattcttctgttctattggtctatatatctctttgtatgccagtcatactgttttgattgctatagatgtgtaatatagtttgatatcaggaagtgtcacgcctccagctttttccttcttactcaatgttgacttggctatgtagggtcttctgtggttccatataaattagaatttttttctatttctatgaaaaatgccattggaattttgatagggattgcattgaatctgtagattgctttgagtagttatggacattttagcaatattaattcttccaaaccaggaacatgggatatctttccatttatttgtatcttctttgatttcttcattcatgtcttactgtcctgagtgtacagatctttaaacctctttggttaaatttattcctattttattctttttgatgctattatagatgggattattttctttctttttcggatagtacattgttagcatattgaagtaaaactgttattttgtatgtgttctgattttgtatcctacgaatttactgaatttgtttattagtgttagtagagttttggtagagtctttagggttttctatatataagatcacatctgtaaacaaatagagtttaacttcatcctttccaatttggacatttttaattttgttgttgttgttgtctaattgctctactatgtacttctggtactatgttgaatagaagtggtgagagtgagcatccttgtcttgttcctgaccttggaagaaaagctttcagcttttcactatggagtataatgttagctgtgggcttgttatatatggtctttattacgttgtggtacatttattctataccttatttgttgagagcttttaattatgaaaggatgttgaattttctcaaatgccttttctgcattcattgagatgatcctatgatttttatccttcattctgttaaggcaatgtatcacatttattgatttgcgtatgttgaacctgtccttggatttgggaataattcctacttaatcatggtatatgatccttgtgatgtgctgctgaattcagtttgctagtattttgttgagcattttttcttgttatactttaagttttagggtacatgtgcacaatgtgcaggttagttacatatgtatacatgtgccatgctggtgtgctgcacccattaactcgtcatttagcattaggtatatctcctaatgctatccctcccccctctccccaccccacaacagtccccagagtgtgatgttccccttcctgtgtccatgtgttctcattgttcaattcccatctacgagtgagaacatgcggtgtttggttttttgtccttgcgatagtttactgagaatgatgatttccaatttcatccatgtccctacaaaggacatgaactcatcattttttatggctgcatagtattccatggtgtatatgtgccacattttcttaatccagtctatcattgttggacatttgggttggttccaagtctttgctattgtgaatagtgccgcaataaacatacatgtgcatgtgtctttatagcagcatgatttatagtcctttgggtatatacccagtaatgggatggctgggtcaaatggtatttctagttctagatccctgaggaatcgccacactgacttccacaatggttgaactagtttacagtcccaccaacagtgtaaaagtgttcctatttctccacatcctctccagcacctgttgtttcttgactttttaatgatcaccattctaactggtgtgagatggtatctcattgtggttttgatttgcatttctctgatggccagtgatgatgagcattttttcatgtgtcttttggctgcataaatgtcttcttttgagaagtgtctgttcatatccttcacccactttttgatggggttgtttgtttttttcttgtaaatttgtttgagttcattgtagattctggatactagccctttgtcagatgagtaggttgcaaaaattttctcccattctataggttgcctgttcactctgatggtagtttcttttgctgtgcagaagctctttagtttaattagatcccatttgtcaattttgtcttttgttgccattgtttttggtattttagacatgaagtccttgcccatgcctatgtcctgaatggtattgcttaggttttcttctagggtttttatggttttaggtctaacgtttaagtcaatataagcaacttcagcaaagtctcaggatacaaaatcaatgtacaaaaatcacaagcattcttatacaccaataacagacaaacagagagccaaatcatgagtgaactcccattcacaattgcttcaaagagaataaaatacttaggaatccaacttacaagggacgtgaaggacctcttcaaggagaactacaaatcactgctcaatgaaataaaagagaatacaaacaaatggaagaacattccatgctcatgggtaggaagaatcaatatcgtgaaaatggccatactgcccaaggtaatttatagattcaatgccatccccagcaagctaccaatgactttcttcacagaattggaaaaaactactttaaagttcatatggaaccaaaaaagagcccgcatcgccaagtcaatcctaagccaaaagaacaaagctggaggcatcatgctacctgacttcaaactatactacaaggctacagtaagcaaaacagcatggtactggtaccaaaacagagatatagatcaatggaacagaacagagccctcagaaataacgccgcatatctacaactatctgatctttgacagacctgagaaaaacaagcaatggggaaaggattccctatttaataaatggtgctgggaaaactggctagccatatgtagaaagccgaaactggatcccttccttacaccttatacaaaaattaattcaagatggattaaagacttgttgagcatttttacatctaagttcatcagggatattggcctgaaattaattaattttccctttctttctttctttctttcctccttccttcctttctttctttcctttcctttatatcctttcctctcttcttttctttctctctccttccttccttcctttctttctttctctctctcttccttccttcttccttccttccttcctttcttttctttcttcctttctttctttctctctctttctcccttccttccttctttccttccttccttctttctctctctctctctttctttctttctttctctctttctctcttctttttttttgttgtgtccttatctggctttggtatgaagggtaacaccagctttataaaacaagtttcgaagtgttctctcttcattttttgcaaaagtttgaagttttacaaaagttccagtattggcattctttaaatgtttggtagaatttacctgtgaagccattggtgagactttctttgttggaaggtttttgattagtgcttcaatcttcttacttcttattggtctgttcaggttttctattttttcttgattcagtcttggtaggttgcatgtttctaggaatttaccagtttcttctaggctatcaatttgtaggcatgtaatcttatgatatcagttgtaatgtcttctttttcatttataattttatttatgtgagtgctctttttttttcttggtaggtctagataaagttccatcaattttgtttatcctttcaaacccaactcttagttttgctgatctcttcaattgtctttctagtctctgtttcatttctttctgccaatatttttttccttctgtcaactttgggcttagctggctcttctatttccttgaggtataaagttaggttgtttatttgagctctttcttcttttttaaagttttattttatttttaattaacaaataaaaattgtatatatgtatggggcacaatgtggttttcaattcatttatacactgtagtgtcatccaatcaggctaatgattttgaggtaggtattcatcactataaacttccctcctaaaactgcttttgctgtgtcccataaattttggtatgttgtgtttccatttttgtctgtctcaagatactttctgatttccattttatttcttttatgacacattggttgctcaagagtgtgttgcggctgggtgtggtggctcacacctgtaatcccagcacttcaggaggctgaggtgggcggatcatgagttcaggagttcaagaccatcctggccaacacagtgaaaccccgtctctactgaaaatacaaaaattagtcaggcatggtggtgcttgcctgtagtcccagctacttgggaggctgaggcaggagaattgcttgaacctgggaggcagaggctgcagtgagccaagactgtaccactgcactccagcctgggtgacagagcgagactccatctcaaaaaaaaaaaaaaaaagtgttgcttaatttttgcatatttatcaatttccctattttccttctgttatgaatttctagttttataccattgtgttcggaaaatatacttgatattatttacatcttctaaaatttgttaagttcaagcatggtggctcatgcttataatcttagtgctttaggaggttgaggcaggaggatcacttgagaccaggagttcaagaccagcttgggcaacatagcaagacctccatctctgaaaaaaaaaaattagctggacatggtggtgtacacttgtagtcctagttactcaggaggctggggcaaggggattgcttaagtccaggagttcaagactaaagggagctttgattgcaccactgcactccagcctgggtgacagagcaagactctgtctctaagacaaaattttttttaaaagaaataaaatttgttaagacttgtttgtgacctaatatgtgatatatcctgaagacttttttgtgtgtgctagagaagaatgtctttttctgctgttgggtggaaagttcggtctatgtctgttaggtccacttggtgtacagtgctgttcacgtctgctgtttcctgtctggatgttctatccattgtcttaaatgggatattgaagtcccctattacattgcattgctttcaatttctccctttatctctgttaatactgctgtgcatatttaggtgctctggtgttgggtgtgtacttatttataactgtgataggtccctgttgaattgaccattttatcagtggaagagggtgggtaatgaccttctttgtctctagagacagtttttgacttacagtctattttgtctgatataactttagctatccctgctgtcttttggttaccatttccatgcaaatggtaaccaaaagaagttttgtctttccatctgctcggtatcccacctatctggaatttacatgatgactagctgtaaacctgtgtgactatggaggggcagatgcgtgaagatcagagatgccctagataatttccttgggggctgcccccaaactctttcctttcttctcccaggaagcgatgctggccttctgttttgcaggctctgttcatgcattttctgcttctcatttgctcagcatgtattgcttgcgctgcagagcactgaagaaaccaagagaggcacgccatgctcacaggagctcacagctggactcttgccaaagaaactcataggcacagagtgtcggctcgaccagagaggagtgcagtgatagaacggtggctgggtctgtgaggcgatgcctgggaagctaggtggtgcgttctgtgcctgggaagtggtttgggtgtaggaagaggtgtgctatatttcccagagcatgggcaggaagagaacctttgtacagtcctttaaggcagtggtccccaacctttttggcaccagggactagtttcatggaagacaatttttccatggaccgtggggtgggacatcattttgggatgaaactgttccacctcagatcatcgggcattagttagattctcataaggagtgtgcaacctagatccctcacatgcgcagttcacagtaaggttcacgctcctatgagaatctgatgctgccgctgatctgacaggaggcagagcccaggcggtcatgttcacttgcccagctcacctcccactgtgcggccctggtactagtccgtggcagggttaggagggttggggacccctgctttaaagcatcttttaagaatttttattatttttactctttaggtccatttaccagaaatttttttattcctgatagctgaaaattctttttcttaagcatagaaatttagtagtgtccatcattatatctgaagtaatgaactcatcttcttctacaaccatgtagtttaaaaagttttattccacatcctagaggcggatcatcagcgtgcttttccattttttaaatgggaagtgatggtttcgcctcccacgtggtgtgtggggccccttagctggtggaagagggtgggtttctgagtgaggatagctgcatccacatgtcctaagcactcactgtgggccacagagatgctcatgtgtggatcacttgcaagccggtgtgtgtgacgagggaggggagaaaggtgttgatggtggcagtgggcggagcaaacttagcgagggtgctaggggtgtcagtgagaccacgatgagcccagctgtcctgagagggccatggctgtctgccttgtcgtttgctcatttgtgtgttaatctgctaggactcatgatttcatgatgtccacggacctcctccagagctgagggctccttgaggtatgtagtgcagttttctgattttacaaatgagcaaacaaggccccacgaggagagaggaggtgctctggagtaagaaaatgctggtctgtatcctgggtgtgcgtgtcctttgttttccgacacggggacaattattcagctgagactgtttcctcctctgcaaagtggattatcatagttctacttcatgcagttgctgtgaaaggtgcagatggtgtgtgtagagcacttaatccagggccgggtgcacagtaggtgctcaataaaaattagttatttttgctgctatccaatcctgctgaccagtggctggcagtcatggctcttcactcttttttgttttttgtttgagacggggtctcgctctgttgcccaggctggagtgcagtggtgcaatcttggctcactgcaggctctgcctccagggctcaagcaattctcccacctcagactcccgagtcactgggactataggtgtgtgccaccacacctggctaattttttttatttttagtagagatgaggtcttgtgatgctggccaggccggtcttgaacacctggccttaagcaatctgcctgccttggcctcccaaagtgctgcgattacaggtgtgagccactgtgccaggccggctctttgctctttactggaagtctcctttccgtccagacaaagttagcccaaaggttaagccagaagaaaggaacatgtcatagagtgaggtcacagggctggcttggagcaggcttcatccctatctgctctgtccctgcagtgacttcctcctgtcatccatgggctgtatttgcatgctgtcacatcctgttctactaatgaagacttaattaaatatcaaaaaagagacataccaaagtgggaagtgtcttcgccttgttctctgtagggcggataggacagcctggctctggtgcctgctcaccatgtccagcgggtgaccctccactctcagcgccatggctgtcaagttggggatgaatgcctgccctgcctgcttcctggggccacccttggcattggataaggaagtatccttaaaatgggtcctaaactggctgggcgcggtggctcatgcctataatcccagcagtttgggaggcgaggtgggtggatcacctgaggtcaggagttggagaccagcctggccaacatggtgaaaccccgtctctactaaaaatataaaaactagccaggtgtggtggtgggtgcctgtaattgcagctacttgggaggctgaggcaagagaattgcttgaacccaggagatggaggttgcagtgagccaacgtggtgccactgcactccagcctcggcaacggagtgagactccgtctcaaaaaaaaaaaaagcgtcctaaactaagactgaaaagcagagaacgaacagaaggaattattagagtttggtagcaagttattggattttaggtatttacatttaaaacaaacaaaacaactcttaaaaagtgaaactgtgaaaagccaacacctagtatcacatttcctgaaaatgaactttgaatctagtactacacattataaatgatataattttagtcagaatttgcatttcaggtaattactggtaaagggagtcagtttctgtgagatggaagctgtgaaaaaatggagtggaagtccctttaggggattaagaaatgaataatgcatgctagcgtttaattttccgcttgttcttgccacattctttttgtatttttttaacaaatttattgaggtataatttaaataccattaatttcaccccttggaaatgtacaattaagttatttttaccagtttagagttctgccaccatcacaagttctagaacatttcatcaccccataaggatccctgggacccgtttccagtcaacctttgttgctttccccagccttgggcagccctgatctttctgtttctctaaatttactttttctggaaagttcatatagatggaccgaccccatcttctgtgtctggcttctttccccagcatcacttctaagcattcatccgtgcacgagctgtgccgcattttctttatcccttcaccacggatggacatttggaaagtttccagttttcgcctcctttgtataatgttgttatgagcatcagtgctttgtgtggacatgtgttttcatttcttttgggtggattcctagtagaattgctgggtcatatggtaaatttatgtttaacttcgtaagaaactgccaaactgctttccacagtggctagcccattttacattcccactagcaatgtatgagggctccaattctccacatcttggccttttctcatattttgtcttagaaattccacttccatttgaattataatcaaatagaaaagatgcttttgtgataacacagacatctcaattagatgaagtgttggactgtgtacctttggtttaacagcagcctagtaattgggaggaattgatttatgttgctgaacaaatgggccagttgccaagggagcatatggcaaataattaatgacagtttgctatggcctttctcatagaacatactccatctggccttccgctgctttatcagggtcatctaattatttaggaaatgcaagcagcttcccttagatggcacgttggtggtagctgtatgtgtctgtggggtgtccaggcctgaaacatcaagacccatgacttatcatttgaatagatgtggtacngtggcagatatagaccccctcatgwccacacanctttcgtgtgtgctaactccctcgtgcactggaacgcggtaatttcctgtgcttctttccagatcgtgcacagaactctggcngccatgctgggttcccttgcagcactggcagcactggctgtgattggngatgtaagttgtcacagtcccaatccctggcttaccactcagtgggatgtcagctcaaagatgttccaggattcaggctttcntggttttttcactattttatatgccacgtccatgtttttgcccaagaaccatgctagaggtatgaactaacaagctacagcattgaagagtacttttcattaggttttgtcacacactcacatcccagtggtgtgattcctcatcgtggtggaggaaaggctcctcatgggcatgtttgcctagggctgtggagctgggttgtgatggggctggatctgggtgttggaactagaggggaccgtcctagctggtgcagaaaggtgggagtcagttgggccagggtctgtcctgaagagatcaggaggcccctggagaggcgtgtttggggatgagggtgtcctgtttgggtctgagcagggcctctctggcagggacatgggaaacaaatgtagggaaacaacagagaccagtggccactggggatggaggcccagagttgtctgagaggcagtgctggaacccagctgagagtgggacagctgccatgccagttcctgtcatctggtctcaggcacggcactgcagagagcacatacagactccactcggaatgtaaccaggggccagtcccgccatgtgggagctgccagaggcaggggctagaaaaaactttattactaaatgcatagatttgacattatagatgccctgggtcaagactgtttttcagcagcgatataatccaacttcaaaggcaagtggatggtgagatttccaaccctggcccgcccactgagtgggtctgcagcagggggcagcgcttcattaggctcatcactgggatggcggcgcacggattaattggcaaatttgtgctttgattgcagagacccagcctgacccatgtggtggagtggattgattttgagacgctggccctgctgtttggcatggtaattacagctctccccgtgggactgggctccacgcctgcggtaaccgggccttctctggcctccaccgctgagggtccttcattatgttaaagacacagcgcctagggcttgactgagaagtgttagtgcaggtctcatgaatctcctgaggaggaatggaatggggctatggttcgtgggcgggagaatttcagcccaaggcgtgtctgacgatgaagtcatattgccatttagaaaagctagcaattcttttgagttatttccgttaaaataaaaaaaatggactatcccaaataaataaaccatgtaggagtttcagtgggagagagagtacctttcattatgtgaataaaggaaggtgtcactcctaagtattagttgggtgtttaccaattgatcatagtgcccagtggccactctgctgtgaggaatgccaccaagtccacctgcaggatctcgaagtgcccaagcgggctagtgtgggactcactagtgtgagtcctaacccagcttaactagaaccagtggagcctgggcagcaggggcagtccacgtgttcctcagcagaccccaaacagtccagtggtctgcaggagggctcttcctctctgggctagaagacttgctctgtgtacagctgggcacgatagatcctcattttccttgccaacatttcgtccctcccaaggctggctgacataacggagggcccagctatgtgacctgatggaaaccgtgccgccatcctctgtgggtggtgcgcagggaggcaggccagtgctctaaccctggcttcacagagtaactaatacttgtgtcgggcctgagacgtatacagagtttgggcatctggatagaagagaggaagtgtaccagatatccctgagatacgccttttttaaaaaaggaatgctatattagtttgctaggactatgtaacaaagtaccacagaccgtgtggcttaaataatataaatgtattttctcacagctctggaggctgcaagtccgagatcacggtgtgggcaggcatgctttctcctgagcctccctcctgggcttgtagatggcaccttctcccagcgttttcactttgtcttccccgtgtgtttctgattcctgagaccctcatcctataaggacatcagtcacactgaatgagggctcaccctaacaacctcattttaatttaattacctccttcaacgccctcactccaaatacagtctcacattcccaggtactaggggctaggaggtgaacatatgaattttgggggacacagcctataaaaatggcttcagcacgtttttctcggtggaattcagttcagcgagcactggcaggttctgtgattctggaactgcagggtacagggtcgttacaaccaggtccctgcctcttctcccccatttcctggcagccaaccacccatgggaccatttacccccatccctgagttctagtctcccagggtggttctgtcagcaaatgtgtaaaacaccacatgggtctccacacgcctgtctcctcatgcgtattcacgtgaagctacattggtgtgcgaagccccacgctccaccgtcagctctcagtggccttttgggtgaggatgaacattgatggtcactctggacatggtggatatttacactgggtctaaattgactggggacatttttgttttctatagtttatttgagagacaatagtgtctgttgggactcctgtttactgagtattgtaatttgaataattatattgcattttcataacctgacaaagtatagaacattcacaggtaaggtgagaaaactgaaggacagaaaggttaattcatatttttgttcaagttcggacttttttttttgagacagagtctcgctctgtctccaggctggagtgcagtggcgtgatcttggctcactgcaagctccccgtcctgggttcatgccattctcctgcctcagcctcctgagtagctgggactacaggcgcccgccaccccacccagctaattttttgtatttttttttttttttagtagagatggggtttcaccatgttagccaggagggtctcgatctcctgatctcgtgatccgcccgccttggcctcccaaagtgctgggattacaggcgtgagccaccacacccagcctcaagttcagactatttttaagtggcagaatcaggatctgaacttgcatcttctcattccaagttcaacacatggtgactgccatcaaagaggtgaagcagaggaacttccagaacattcactagctgagatgtctggttgataaaattcagaataactgggacatgactttttattaggatccaggatggctgtttctgttttcactaactcatcatcctcactggaaagaaacaggtgataggcattctgggttcacctggaacccagggagcaatcatttcaataaaactctcaaattggtgacaaaaatcagtttaattattttagaaaacaaaattgaacccaattttagcatcatagaatgtttaagtgttgcttgtgtggacacgtaggtgcagaaggccacatgctggctcccgcccggcttctagatttgtggctgtgagcaacccacctcgcactctgatcccattttctagtctataaaacagagggtgaaaataacacctgatttttttgtgtgtgaggatcagatgggatggtaatgtgccttgaggacaaatccctggacacacatataggcacaaaactgctagcaagaggctccattcaaggagtgagtgagtgtactattccaggaagtgacggtctttctgcatctcagagtgaggagcttggtgatgtggtggctttcagaggccagagctcaaatgtgtaagggatcatgctgatgtcgttttaatatggtgtcctgctaaaagattatccttgtcttcttcttttccccatagatgatcttagtagccatattttcagaaacgggatttttcgattattgtgctgtaaaggtaggtatgatgttgcatttaataattctatcctgattaatttatatatgtatttttctgacattatatatttaggaaacaaacatttaaaacaaacattgaaaaattccatccttcttttaaaggttgcttctgcagggcagggtatacttgctatgttaagttgtatggctctgagcagcactttcagctgctcagtaaataaatgaagaaggaggtcaaggaaaagggtactcaggttgaatcgttgtgtattatttaaattgtctggtgagagctacacatcaaaaattgttttacatattagagtatcccaatatttcaagccattagcttctgattactttgctttttggtgaaataatttccatgattncttcctaaatattgaatatatacacatttacatttttaactggaaccctggggagcttcaccagccagctctggcctccaggatttgtacctgtcctgtcattcagggttggcaagaggagagctcaacatgtaccatgccctgctaatgcagtctagtgctgtgcttgaatatatattatttttgaaactgaaaaggtctttttaaaaattactcaacaggctgggcgcagtggctcacgcctgtaatcctagtactttgggagcccaaggtgggcagatcacgaggtcaagaggttgagaccatcctggtgaacatggtgaaacctcatctctactaaaaatacaaaaattagctgggcgtggtagcacacgcctgtaatcccagctactcgggaggctgaggcgagagaattgcttgaaccccaggcgtggaggttgcagtgagccgagatcacaccaccaaactccagcctgggtggcagagtgagactctgtctcaaaaaaaaaaaaaaattactcaacaaagccctttgcaaactctgaatgatggaactgtgctgtgatttttgtcatctttgagccccaccttatacatgccaggtagatatttggtctattactccttactattaaaagtatcccttagttccccagagatcagcagacactaggctcacatggatcccaaatgtcaaagcccaggttgtctaaccagaataccgatggcattacgggactgagggtcatcaccttgtgacaaattaaccatcacaggggctctgtgaaggaagaggatcagaggggtgacagtgctggctagggaggatttagaatgtctaggaacttcgatggccagcactgtctctatctcggcccccctaggactccgtgggtctatgtcttaacccatggggtaatgttagtttggctccctgttcttaaagtcactaatgaaaggctgcctctgttctacgagcctgctcactctggcttgtactctctctgtgtgtgtgtggccaggcataccggctctcccngggacgggtgtgggccatgatcatcatgctctgtctcatcgcggccgtcctctctgccttcttsgacaacgtcaccaccatgctcctcttcacgcctgtgaccataaggtacgcaaagcacctctgccgtgggngttgcggccaggttctggcaggcaggggctctgcctgcactgcctggctccaggttccattctcaggtgcatgaaaaggwgggggcngttgagcccacagctcactgcattccagtccagctcgtgtctgctttgtgtgactgcagtacatgctacaagcagtggggcctcagaagctggtggcagaaatgcctgcaggaggtggaagacataggccttgctttcctggagattgtggtctcatggggagacatgtggacaagaatggctcacccctggtgaaaccccgtctctactaaaaatacagaaattagccaggcgtggtggcacgtgcctgtaatcccagctactggggaggctgaggcaggagaatcccttgaacccgggaggcggaggttgcagtgagctgagattgcgccaccacactccagcctgggcaacagagcgagactccgtctcaaaaaacaaacaaacaaacaaacaaaaaatggctcaccccagaccaccaggtgcccaggtgccaggagtccctgtccatgttcttctccatcaccatctgctgaggtggtgggaggcctctgagtgagacccaaggccgggtcctgtgtgggagtgggctgtgtggatgagcaggtgtaggggatgctgtgatgtgccttctacactttctttagagcaatgtttcccagctgtgtgcatactgggtcccctggggagctgtagagcaccactgcccgggcccactcccaggcactggtctgcgctgggcgagttgtaggactcccagattccagcacaaatctagtgtgaggccatggtggagctccacagctgtagaatgtggcttagacagatctgtagggtgaatacagttagcatgaattgattgtacactccaagatagctagaagagaataactggaatgctcccagggtaaagaacagattgatatttaaggggatggttatcctagttacctggtttgattatgtgaattattacattatcatatgcaccctgaaaatgtatgtatgtatatatatatctagtatgttttatagcaatacaaagtaaatacatagaaaatacatagatgaataaaacaaagggagggggtgagaagagagcctagggccttggtgtccaggaagggggaggtgggaaaggggctgagtcagcaggccctgtgtgagccatccgcactgcctccacactgacccccacagcactggcttgcctgtggagggcctgccctgccctgggggccagtgctccctccagacctgggagcattggggaaagggtacctgaccacaccgagggtttggtggctggaggctcactctggaaaggaatgtaactctcggagtgagctgtggcctgcgggggttgttgcagttgttcattccccccagcactgccttccccacaggggtgtgtgtgtgtgcgcgcctcccttatacgagcaagcgccttaaaaatctctgggttgcatgtgggcctttcacgatgtgtatagtgggactactttcattttcctccatttgtgacaggttgtgtgaggtgctcaaccttgatccaagacaagtcctgattgcagaagtgatcttcacaaacattggaggagctgccactgccatcggggaccctccaaatgtcattattgtttccaaccaagagctgaggaagatggtacgtaccagcatgctagggttgcttccagtaaacgcacacctccacttagttagagctctaccccacatggacgcctttgttagaaatcaagatcatcacgccacctcttcacagtaagtgctactgggcatctcaagactgggatgttaggtgactggtccttcaatcctagagttaactggcttgaattgacttcatactcattctgatcagtttttaaagaaatgactggatagcatgatgtagttagtcatagtatgttatattaattgtattaataggaactgaggtttcttccaacctacattaaaaacaaaatgacctgttccctctcactggagatatgggattcccaaactgtggtggattagtttactgatgaaggacttaaaatttattttttaagggtcagaaatgaatgtctttagaaattctttgaaagccccatataaatattagggtataatttctttgtatactgtaataaagacaaagtattagaaagtgcaaggtattctacatatcttcaaggtgaaaattgaactatatcattaatttttattctctactctttgatcattagaattttctcaatcttcctcctctgaggcatcagtgaaaatgcttccacattggtgttatttcttgtagatgatgtgtttgtgtgtgtgtgtgcctgaagggtagcagtgtgtttgtatttgaacgctgtgttccataaaaatatttaaacatttgagaatccatggctccagggtgttaatggccgcttcatggaagcagtgcgctccagaggttctgggtatggctctgcattccctagctgccgtgggaaactgcttggcaacacttcaccaactttgccatgtgaactgaggtgtgcagccatggtcatgccaccctggagcatgtcaggtggtaacagaccctgcagtttatgctaggggcacctgttatccaggatggagctcatgctcatggaatagaagtatttttagaaaaaaattgtattgttagtttcattccataaacaggtaatactttttttggtagaaaacagaagtctcacagacatgcacatgcacatacaataaaaattcataattccaaaaaccagaggtaaattcttttaatattttggtgcaaatagcatcctagagtgtttgtatgtggatatagatgagtacaaaagacagcacagcttctgcttctggccaacatggaataacagggcctggatttactctcttgcctgggatagtcaaacaaaacaaaaataaaccaaaaccagacaaaacacatggaacaatggtaaccaagtcactggataacaggcacaaagggacagtgatccctgtgagacgggaaacaaatgcggtgagctctatgactgctccagctcactacctcaagagagcttccagagtgcagtgcagggagggacgaccctggccaagcccatgacaccccctgagttgagaggatgaagctgaaagtctggggagaccagggcagcgagagtccagagaggacacagctgaaccacagagatcctcagagggtccctttggagtgttcagcagagtgttcagatcagtgcattcatgcgaggagactacatgagacccggggagaacaacccagaaagatgagagggacaagtgcttgacgcacacgacaggaatagtaatgatatctgttctgccaggcagactggaacctcttaatttatggagcactgggtagagtactcacaagtgtcttgcctcagttatgaggggtaattaactataaactgaacactgctctgcttccacctaagaaatcttgaaactaagaccccaaagaaccaaactgtttctaagtattttaactgcatcctagaacaaacgtcaagaatatttagagtgatacaaaaatattcaacaacacacagggtaaaatttgcaatgtctggcaaccaatcactgattatcaggcatgtaaagaagcaagaaaatataacctatgacagcgatgatacaaaccatttgaaactaacgtagaacaggcacaggtgttagaattagcagactaggacattaaaagtgttattataatggtgttacagatattcaccaagtagcaacattaaagatattaaaaaagccccacatcaaacatctagacatgaacattacaatgtctgagatagaaatacacttgctgggattagtggcatattaaatattacataaggaaagattaatgaagacataaatccaaaatgaaatggagtaaaaagataataacaaggactgaaaagcattagtgagctatgggaaaatttcaagtggcctaacatatgcaattctcatctctgaaggagagaggggaacggaaaaaggcatctgaaaaatggtcctaaattccaaattttatgaatggtataaacccacagaatcaagaagttcaatgaagccagagcccaagaaacacgtagaatactacagtaagacacatcataatcaaattatttgaaagcaagatgaagagaaaatcttagtttccaaagaaaaagacatgttacaggcgaggaaacagagataaagacgacaatatatttctctttagagataatgcacgtgtgaaggcaacggagcaatacctttaaatactgaaagaaaacacctgtgatctcagaatactacacccggtgaaaatctttttcttatgtacaaaaaacagactttttctcatatagaaaagctaaaaagaatgcatcagcagcagacccacatggtaagacatactaaaggaagtccttaaggcagaaggaaaataacaccaaatggaaacatggatcttcacaaagtcatgaagaatactgaaaagggtaactacatggggaaattcacataatttaaaaaattactggccgtgcgcggtggctcacgcctgtaatcccagcactttgggaggctgaggcggtcggatcatgaggtcaggagatcaggaccatcctggttaacaaggtgaaaccccgtctctactaaaaatacaaaaacttagccaggcgtggtattgggtgcctgtagtcccagctactctggaggctgaggcaggagaatggcgtgaacccatgaggcggagcttgcagcgagccgagatcgtgccactgcactccatccagcctgggcaacagagcgagactctgtctcaaaaaacaaaaaaaaattaagccactttgagataattgtttaaagaaaacagtaatgtaacatgtaagtagaattgatgacaacaataaaataaagcctggaagggaagaaattaaagtatattaatgtgtcaggtgcggtggctcacacctgtaatcccagcactttgggaggctgaggcgggtggatcatgaggtgtggagatcgagaccatcctggctaacacggttaaaacccgtctctactagaaatccaaaaaaaaaaaaaaaaaaacactagctgggcatggtggcacgtgcttgtagtcccagctactcaggaggctgaggcagaaggattgcttgaacccaggaggcggaggttgcagtgagccaagactgtgccactgcactccagcctgggtgaaagagtgagactctgtctcaaaaaaaaaaaaaaagtatattaatgtaagattttttatagtatatgtaaactaatataatttgaaggtagtccgtgaaagttaaaaatgtatatgataaactctaaagcaaccgctaaaaggaaaaacaaagagtaacagctaatgccaacaaagaatataagtggaatcataaatagtatttatttaatggaatggaatttagaaaaaaggcaaaaggaagcaaagaaatggtggaacaaatataaaacaaattgcaagagttaaacctaactatatttaataattacataacatataaatagtttaaatatcccaattaaaaagcagggattgtcagatcaaacaaacaagccccatccaactatagatgctcctcagctaactttgggattacatccagataaacttactgtaagttaaaaatatcataagccaaaatgtgtttaatatacctaacctactgaacatcatagcttagcctaagcccaccttaaatgtgctcagaacacttacattagcatatagttgggcaaaatctaacacaaagtctactttataataaagtgctggatagctcatgtaacttattgaatattgtacattacatcaaagttgagatgcttttgcaccattgtgaaattgaaaaattgtaaatggaaccaaattaagtcagggaacatctgcattatgctgcttacaagacacaagtttaaaatataaagatacaaggccaggcgcggtggctcatgcctgtaatcccagcactttgggaggccgaggctggtggatcacctaagatcaagagttcaagaccatcctggctaacatggtgaaaccccgtctctactaaaagtacaaaatattagccgggcatggtggcaggcacgtggaatcctagctacttgggagactgaggcaggagaatcgcttgaacccggaagatggaggttgcagtgagacaagatcaccccattgcactccagcctgggtgacgagtgaaactccgtctcaggaaaaaaaaaaatgtctctctctctctctctatatatatacacacatatatacatatagacacaagttaaaagtaaaggaatggcaaaagattcatcagaacaaagtggctatattaatatctgacaaagtagactgcagagcaaagaatatttctaggattaaagaacatttcatcataataaaggggtaaattcatatagtgaacataaaaattacatttatacaaccaatgacagagctttaaaatatgtgaaacttgatagtactgcaggaggaatagataaatccttaattatagttggagagttcagtacaattctcacaataattgaaagaacaagtagagagaaaatctacaaggatatagaaaacttcattattgttaactaacatgacctagttgatatttatagaaaacgccactcaatatcagaagaatgtatatgtttttccaactgcacttgaaacattaactgaaatggattctaggccataagacagatctcaataaacttaaaaagattcaagtaatataaaatattttctgtgaccacagttgaattaaattagaatataataacaaggatatgtggaaaatcctcaaatatctggaaactaaataacacacatttcagtaatccaagggtcaaagaagaaagtgagattgaaattagaaagtatttttgtactcatcagcttggaatgcgataaccaaataccatagactgggcagcttaaataacagcaatttattcctcacagtcgggaggctagaaagttcaagatccagtggatctcattccctggtgagggctgtcttccaggcttgcagatggccgctctctcactgtgtcctcatgtggcagggaggcggggagaagaggcagagatgaagctctctggtgtctcttcttatacaggcattaatcccagtgtgagggctccaccctcatgacctcatctaagccctatcacctccaaaagactccatctcctaataccaccccattgagggggcgaggtagggctttggccacagtactttcggggaaacacaattcagtcccgagcaattttgtgttgaattatagtgaaaacagaacatatcagaatttgtgggattcctctatagcagaagtcagtagacttcttaaaaggccatatatagttaattttatagacgtgtgggctgtatggtctccattgcaattactcagctgcaccactatatagcaagaaagcagccatagacaacacataaatgaatggatatggctatattccagctccacgtgtgctagtccctactctaaagcagtatttagaaggaaatttataacactaaacacctgtatttgaaaagatgtgtctcaaatccataacctcagctttatcctatggaatcagaaagagaaattaaactaaaagtaagcagaagaaaaaaatatatacagactagaaaaatagggaacatcaacgaaagcaaaagctggttctttgacaagatcaataatattgataaacatctcgccaagctgatgaggaaaatgagacagaagattcaagttactaatatcaagaataagagttgttatattacaacagagcatacagacattaatactattcttagagaagatcatggacaactctatgtaaactatttgacaacttagataaaataaacaattttttggaaacacacactctttaaaacttcactcaagaagaagtaggtaacctgagtagccctgtatctatagaagaatcaaatatgtagttaaaaaccttcccacaaagaacaaaacaaacataaacaaacaactcaggctaagatagcttctttggtgaattctcccaaatagttaaggaaaaaataatgttataataccaattctatacaaagctttacagtaaattgaagaggtgagaatatttcccaattaattctatgaggccttgatatgtgaactagacaaaaccagtatgagaaaaggcaactatagataaatatttcttgtgaacatagatttaatatttaaaaaattagtaaatccaatttaacaatatctaaataggtaatacatcttaaccaagtagaatttatccaggaatggaagattcttatatttgaaatattaatcaatgtaatttactatactaacaaactaaatgagaaaaccatatgatcatctcaatagatgcagaaaaaacatttggcaaaatccgatatctattactgataaaatctctcaagaaactaaggataaaagagaaattcatcaacccaataaagaacatctgagaatctatagctagcatcatacttcattgagaataactgaatgatttccctctaacatcagaaacaagacaaggatatctgttctcactatttttattcaacattttattggaggctgtagctcacgtgataatgcaagaaaagaaatacaaagcatcaatattggtaaggaagaattaaaagtctttatttgcggatgacacaatcgtccacgtagaagatttggtgcagtccacaaaagagctcctacaaataaataaatttgacaaggttgcaggatacggagtccatatacaaaaattaatggttttctatatttagcaataaataactgaaaattaaaatttcacttacagtagcacaaaacatatgctgtattcagtattgcatatgaccaaacatacgcaaggcctatatactgaaaactacaaaactgcagagtaattaaagaagatctaaataaattaagaggtacaccttgtttatgggctggaaaactcaatattgttaagctatccattctttccaaattaatctataaattcaagcaatccccatcaaaactatagcaggttttctctttgggtagaaattgacaagctgattctaaaatttatacagaaattcagagtatccagaatgacaaaaaaagaaaacaaaaacaaatggaaagggctagtacttcctgacaccaagatttattataaagtctcagtaaccaagacagtggttttggcatcaagacagacaaatagataaatggaataaagtagggagtgtagatacaggcccacacataagtgaactactgatttttgacaaaggtgcaaagccaagtcagcagagacaagatagcgttttccacaaattgtcctggaacaaatgtatattcatattcaggaaaaatgaactttagtccacacctctcactatatccacaaattaactcaaactggatcatagatgtaagtgtaaaacctaaaaccttaatttctagtggaaaacctaagttgtagtagaataggtagaaaaatagttcaagtgaagatgtggctactgtacttcattacactctttagaacttggctttcaacttatttttttttcttctttttaagacaatatttaatgaatgctgcaacagtttaactctcctgactagcatcacattagtgttaatgtaaaatcctaggcatggtgtatttcttacacacaatctgaattaactctgcatcattttaagcctgcccttacagtcctagatcgaaatattctgaactaaacaatatgatatgacccaagacagacactggctgtgtttctaccaagccacgtagaaaactgagggcaaagagcagtctgtcagaccattgctacaatcctccatggcatatgacgagcctttttaagatatccaggttttaaatacgatggtaggaaagaaaggtgaggaccctggaggtgagtacaccctatggtcttgctgaggctcagcccaggcttgtcatacaattttctgccaaagtgacattctctgggaagatggccttaggactgtccttattttactgaagacagcattccttgtcttctacttaatgactttctctgaatttgggaattaaactgtaatggagtctcaccctattgcccaggctggagtgcagtagcgtgatcttggctcactgcaacctccgcctcctgggttcaagcaattctcctgcctcagcctcctgagtagctgggattacaggtgcataccaccacgcctggctaatttttatatttttagtagagatggggtttcactgtgttgcccaagctggtcttggaattactgacctcaggtgatccatctgcctcggcctcccaaagtgctgagattataggcatgagccgccatgcccggccttgattttaatttatttcacagtagtttggagataaggaaatacttctctgtatggagacacagatgcactcatagtttcagggacagtgtcttcagtagagataaatttataaagcctcattatcaatagtgacagcacagccatacatttgcctcacatgatgtgcatatttattttgcattgtttacttgttcatcaaggaactcaaataggaagaaaacagattatgaaataaaacttaagtttgaaattaattttaaaattattcctgaagaggaagtcctagtcagagtaatcagacaagagaaagaaataaagagtacccaaattggaaaagaggaagtcaaactatgtctgtttgccactgatatgatcttatacctagaaaagtctagactcctccaagactcctagatttgataaatgaattcagtaaaatctcaggttacaaaatcaatgtacacaaatcagtagcactgctatataccaacaatgaccaagccaagaatcaaatcaagaactcaatccctttcacaatagctaccaaaaaaataaaatacctagggatatacttaaccaaggagttgaaagatgtctaaaaggagagctacaaaacactgctgaaagaaatcatagatgacacaaacaaatggaaatgcatcccatacttatggattggaagagtcagtatcacaaaatgaccatattgcccaaagtaacttacagattcaatgcaattcctatcaaaatgccaatatcatttttcacagaattagaaaaaccaatcttgaaattcatatggaaccaaaaaagagcctgaatagccgccaaagcaatcctaaataaaaataacaaatctagagacatcacattactcaacttcaaattatactaaaaggctatagtaaccaaaacagcatggtactagtataaaagtagacacatagagcaatggaacagaattgagaacccagacataaagccaaatacttacaaccaactgatcttcaacaaagtatacaaaaacataaactgggtaaaagacactctcttcagtaaatgatgctgggaaaactggctagccacatgtagaagaatgaaactggatccctatctctcacgatatacaatataactgaagatggattaaagacttaaatctaagacttgaaaccataaaaattctagaagaaaacctatgaaaaactcctttggacactgacccaggcaaagaatttaggacaaagaccccaaaaacaaatgctgcagaaacaaaaataaatgggatctaattaaactgaaaagctaatgcagactgggcatggtggctcacgcctgtaatcccagcactttgggaggccaaggtgggaggatcacttcaggtcaggagttagagaccagcctggccaacacggtgaaaccccatctctactaaaaataaaataaaaaaatagctgggcgtggtggtgcatgcttgtaatcccagctactcgggaggctgaggcaggagaatcacttgaaccagggaggcagaggttgcagtgagccgagattgcaccactgcactccagcttgggtgagaaagagagactctgtcacaaaaataaaataaaataaaataaaataaaataaaataaaataaaataaaataaaataaaataaccatcaaagtaaacagaaaacctacagaatgggagacaatgtttgcaaactatgaatctgacaaaggactaatatccagaatctataagaaactcaaacaaattagcaagaaaaaaaaaataatcccaataaaaagtaggcaaatgacatgagtagacatttttgaagaagatatgcaactggccaagaaacatatgaaaaaatgctgaacatcactaatcatcaggaaatacaaattaaaagaatgagatatcaccttattacagccagaatggccattatggccattattaaaaagtcaaaaaacaatagatgttggcacagatgtggtaaaaagggaatgcttatacactgctggtttgaatgtaaattaatacaacccttatggaaaatactgtggagatttctcaatgaactaaaagtatatctaccattcaatccagcaatccagtcactgggtatctacccaaaggaaaagaagtcattatatcaaaaagacaccggcacacttatgtttatcacagcacaattcacaactgcagagatatggactcaacctaaatgcctatcaacagataagtggataaagaaaatttgagagagagagagatatgcgtgtatatacacccacacacaccatagaatactactcagccataaaaaagaatgaactaatgtcttttgcagcaacttggatggaactggaggccattattctaagtgaagtaactcagaaatggaaaagcaaataccgcatgttctcacatataagtgggagctaagttgtgagtatgcaaaggcatacactggtaacgagaacattggagactaggaagaggggaggtcaggaggggttgatggatgaaaaactacatattatgtacaatgtccactactctggtgatgggtgcactaaaatcccagacttcaccagtatataatttatccatgtaaccgaaaaccacttgcacccctaaagctaatgaaaaaaaaattcacaaagaaaatgaatacttatgtagtttggaggaataataaacaaatcagcactagagtttggaacagtaaagaagtcacatctgaaaactcgtccacattttccgagcattgggcagaaacgacaggaagttgtgaggaaagttcttgccacctaccattgctgcacgaggcttaggtctctcaggtctcttgggataactctctgtcggtggaatttccagcactggacaggtaggtagggaggacctccaggacccaccacatggacaaccacttattccccagccacaagcctcccttgggtaagcatgagtcggcctggctgtagcatccacgcgcaccaacccactgcaccttcagctcctaacaagctgacaggataaagttttactttgctggttacatttgctcctttatgcctgttctacagagactcaccatggtgagcaaaactattcaactatctttaaaataatacctgaaaagtctcttgagggaagcgtgcccctatgcttctgaatagcatctttgtaagaagacaggtttcccttcatgccccacgttgtgtacttggatgctttttatacttttcccactatactgtgcgctgggcttgctgggacattcttcccgttttcccaccatgccatgcgtgctggggcgttcttcacgttttcccatcatgtcttgcatgctgggaggttctttccgtgttctcaccatgccgggcatgctggggcgttcttcaggctttcctgccatactgtgcttgctgggacattataattatgttttcccaccatgccttgcatgctggggcatttttcacgttttcccaccatgccgtgcttgctggggagttcttcaggctttccctgccgtactgtgcatgctgggacgttctttacgttttcccatcatgccgtgggtgctgccacgttcttcctgttttcccaccatcccatgtgtgcagggacgtttttcacgttttcccaccatgccatacgtactggggtattcttcaggctttccctgccatactgtgcatgctgggatgttctttatgttttcccaacattctgtgtgtgctgggatgtttttcacgttttcccagcatgcgttcttcaggctttccctgccgtactgcgtatgctgggacattcttaatgttttcccaccatgccgtgtgtgctggggcgttcttcaggctttccctgccatactgtgcatgctgggacattcttcatgttttcccatcatgctgtgcgtgctgggacattctttacattttcccaccgtgctgtgtgtgctgggaccttcttcatattttcccaccatgccgtgcctgctggggcgtttttcctgcgttcctgccatgctgcatgtgctgtgaagttctttggcttctcctccactactgcttttcccccactcccttgggtgttaattgagacagtgtctctctcttgtgggccctgctctgcctctctggccccctctgaatttcctttatggggttttttttttggtttgttggtttccacacacctatttaatatctgtgggctcaggggtcttcgtttttgacctttttctcctctcagatcagcactggctagcaaagctcatcccctccgtggcttgctccgttttcagcttgctgggatctgtgtctctgccagaggctcttcctttagacccatgtgtgccaggacccctgcacctatgcttgatggatcccttacaagcagcgagacccacacccccgtctggcccacacgcattcctgcagtgctgggtcctctccttactggccatctagacaggattatattttcaaattacaccatgcatattttactaaaatattcaatagattcagctaaacacttcataagaagcttttttttttttttaaattttcacatggaagaattcaagaaatcattttggcttgagcccctcctttgcaacctaatggaccattttgacttgtcacagagctagcctgaagcgtcattcctagaaaatgatattggtgggccagaagtccctcaggcgtgtccccttaaatgtatgtagattatgaatctgggaatgttctgatctgattgagggttcctcttttgtttggtttacgtgcctaatatttggccatttaatccatcaaatgaggacagtggggaaaattaagaagaaaatgactgagtggagcctataataaaacaatacaaagcagaagtggcaccttgaagcagaaagagcgcatttaggcgctgaattgatgtgagtgtgctggtggatagttttgttactgggaacacagacgagagtctaggaaattacagaggcatgtaaaagcagcagggtgtcccagatacctgcgcctaataagcttagtgcaaacatctgcatcccactgcacactgcatctgcctgtttcctaaagtgatcagtttggatttttcccttatcattgctcttttgatgaatccacccatcgcaagtctagtagcaaccaaatgcttcactcagtgctgtgtcattttgctgtggacgcacacccaggacctccttacttttttttttttcttttatctactcatcacttttttctccaattgccccaacatttcaaatggggcaaaactttatagttattatgttctagagggaccaagaattactcaggatataggtacttctgtcttcttgggacattttctctaaaaaatattaacaattgcatttcatgacccagctagtgtataaatatattagtactatagtttaaatcattttctctgacgcaacagttcctttttttttttttttgcctctgagtttagaagaatttaaaacagtttcataagcccctaaaagtatcgtggatctttttcagatatctggggtatgaattatagagataaacacaaaattcaatgtaatacccccattgaagaactatcgggaaagtggtgaattcttctatatgatcacccaaagcattccatgagtcccgcctctgtgtggtttccctgccatctgtccaggaattagcttatatagctccacctgtcatttgtaatgctgttttcaaggacaaccattggatgtgccggtaactgcaagggattaagcatttcagattattgtatattggcaagctctaaacttttacacaacttcattgataatggcctctagttgtgttgtatctttaataatgttgaaagtgatttcacatattttctaaaagtgagaggaaaaatacataaattttaataaggaacaattaatatagtttaaatcactcaaacccagacctttggaaggtgattttccaaactcccaacgtgggatcctcactaacgttctgtgtgacttgccacccctctacctatgtaagaggttcctaagggtcccaaggcagagctggactgcccgtggtccctcccaccctgcccctgtcattccccatggtcgtgcattgtcactgtgcctctgaccccctttgtggcacctgtgattcatggacactacagaaaagaccttgagttcttgccagatggccagcttcatggggataagagcctcatctgtcctgctgggggctcaggaggtgcctgcacagatgtgctgaaggtgtaaaagcacatggtctgtgaaagaacagaaccaaccaatgacgctgctgacttactccaggacgtctgtgaaagaacagaaccaaccaatgacgctgctgacttattccaggacgtcagcgaaagagcagaaccaaccaatgacgctgctgacttattccaggacgccagtgaaagaacagaaccaaccaatgacgctgctgacttattccaggacgtcagtgaaagaacagaaccaaccaatgacgctgctgacttattccaggacgtcagtgaaagaacagaaccaaccaatgatgctgctgacttattccaggacgtttgtgtgtgaaagaacagaaccaaccaatgacgccgctgacttattccaggacaaatcaacctagtggggatttgcccaactctaaagataccctcagtggccggccacgtgcagagccctaggcaggcaaaggaagcgtgccgggaaggagaggttcctgcttgagtccctgcggctggtccccatgctctaagcgatcccagccctgatgggccctgagtgccctgcaaagggctgtgctctccagccacgaggacactttcaaaccgatggcagggacttaaatgaagtgtttaaaaattcaacttacctttaaatgggcaaatattatcatatagtttagtattttgtcccattcagtcttttttcaccctatcttggggaaggcatcaatctagtggtgaagatggaccaagccaaggttgagttagatgtggtagcctgtttttgtttcttcctatgatggcttgtcatttgtgtaagaattggtttttggttttcgacatgaaagaaacaaacgttaacaattttcaaaatcatggtaaggaatccgtggtctttcgtgggctttgtgttgggctccaggacctctgcctaaggtcctggaactcctggtgagccccttccctcctgggctctggccctccctggaccctgactcagggagctgctgcctgtgcggaggaaaggcccgtcttccgtttctttttgtttgtttgttttgagacggagtctcgctctgtcgcccaggctggagtgcagtggcatgatctcggctcactgcaagttccgcctctcgggttcacgccattctcctgcctcagcctcccgagtagctgggactacaggcacccgccaccacgcccagttaattttttgtattttttagtagagacaggttttcactgtgttagccaggatggtctccatctccggacctcgtgatcgacccacctcggaaagtgctgggattacaggcgtgagccaccatgcctgggctgccatttcatttccccttgtttatttccagggcctggactttgccggattcactgcacacatgttcattgggatttgncttgttctcctggtctgctttccgctcctcagactcctttactggaacagaaagctttataacaaggaacccagtgagattgttggtgagtacaagtgcaacctcatgtaggctcagatttcatgaccataatattgtttgtttaccaggagaagttcttattaggaagtatctgttgatgggttgctggatgctcaataccagtgactctccacgtccaccttctagtatacactgttttcagggctgctatcatgagctgtgcctctttagttttcgtgaagtgtactgtccctaaaatgtgggaagtaatggccaccatgtacaactcacatgtcataaccccctaaagccacgtgtatatggtacaaatacactaacatatagactgcagtgctctaatagtgtatcatagcttgagtcttaaatatgactggaaataacagcaacataacccagcacaggaggtgatgggccctgtcaatcaagagcacatgctaggccaggcacggtggctcacgcctgtaatcccagcactttgggaggccaaggtgggcggatcacctgaatcaggtcaggagttcgactccagcctggccaacatggtgaaaccccgtctctactaaaaatacagaaattagccgggcatggtggcacaggcctgtaatcccagctactcaggaggctgaggcaggagaattgcttgaacccaggaggtggaggttgcagtgagccaagatcgtgccactgcactccagcctgggcgacagagtgaaactctgtctcaaaaacaaacaaacaaacaaacaaacaaacaaacagcagatgctgagcaccagccagcaggatgagggcttagggccatcttatcgttttgcattttcatcactaaaacactttagtagatgttttactgagatcattactgattagaatatattaggaacaatagattatttgggaaacaagcagcctttccttgacgagctccagaatatggatgctgtgcaggttgcctgggtaacaggggcatcaggcgaccagagctcagcagatgaaggcgctcttctttgggaatttgtagagctcacggattgcatgttgatctctctcagcctttgtgattctgctggcctgtgttttacaggatctcagtttgtctttgttctggataagatacccagattccatttccacatgggtggctggaggccacgacatggtcctgccatactccagttcctccgatgctgactgtccaagacagatctgtgtgactttcatgttattcagaatttgagtatttaaaaaatctcattaagaaaacattgttttgcattcctcctcaggattcatctgtcaaaacaagcttgttcttgggaatatctactcatcttacctgggggctggacctagttcaacccataacaactagttagaggtgtttagaatgttttataatcaactaatatatgcaaagtaagataaattaatatataggtttctttttctgatgaaaatgttagaactaagggagagtgaaggagactgtgatcgtggtggataattgtcctgtctcttggagcttgtgtgtgcacagctgtgtcttagtggagagctcaaccgtcatcctgcccaactatgccagcctctcccaacctccctggtgatcacagtgacctgggacaattgttgtatatgcagattttcagcgtcatccccaggaattctgtgttgttagtaagctgtcctgaagagtctaatcttgagatgaatttgggatacacagatttagacacacagaaaataatctctgtaatgaattcctcaccgttcctgagtaaggaacagagaaaagcttcgagggaagtggggagtgatggttggaagtggacacacctggtgatgcaggaaccctatggccgggctaagaccagcagtgcaaggtggggtgattgctctgtgccactgtggggcttagagggctccaaatttggagtggtgggtaaaactgcagattcccaagccccactcaagagatctgagtttagcaggcctgtggtggtgtacagagcattgtcagaacaggcttggttatgttgcagtgaaaaagtaaccctgaaatctcagtgacttccagaactgtgttttcttccttgtgttggctttgtaccccccgccccctccccaatggactggcaggggccctgatcatcatctgttcttagagtcctgagcggctagccttgaaggcaaagagaatagcatggtcccattctgccatccagtgacacaggcaggccccacccagtcacaagggaccaggacaggccagcctgccaggtgctcagaatgggagagagcatgacttacatggtgaaaagaacaataatcaccagagcctatccctctgatcaccaaatgttcaactcatgctgcttcttgctaatactttgtttagcattttgtttttgtgtacattagggatcttgattgtagtttcctttcttgtaatgtcttttttgttgtcctcataggaggaatatggaaatatttcctcatcttcaattttttggaagaatttctgtagaattgctattacttttttcttaaatgtttatttggacatttataggcctggatgtttttgtggaaaggtttttaactacaaattcaaatcccttaatatacatatagggatggctattcaagttatctgtttctccttgagtgttgactggtagttggtgtctttcaaggaatttgtccatttaatctaagttgttgaatgtattgttataaaattgttcataatattctttcattatccttttaagggctatcaaatttttgataatgtcatatctctcattcctgatgttggtagtttgatagtttgtgtcttctctctctctttggttggtttatcaattttattgatctcaaagaaccagcttttgattatatagatttttctctacaatttttttctcttttaataatgtctattgtgctctttatttattttttttctgcttactttcaggcttgcttattttttcactggtttcttaaagtggaggctaaggttattgattttatgtgcatcttattttctaatataggcctttagtgctctaaatttccttctaagtattactttagtggcctctcactaatttattatttttatttcattttcattcagttcaaattatcttataatgcatctttttattttttctttgatccttggataatttagatggtttatataccttccaagtatttgggaaagtttttgcagttacctaatttagttccactgtagtaagagaatatatttcataaatcttgaatcctttaacatttattgaggcttgtatggctatagaatgtggtctacctttgtaaacattctgtgtgcactagaaatgaaaacgtattctgctcttgttaggagggatgttcagtgatgtcaattatatagcttaggtcagattggctgataatgttattcaagtattctatattcttgctgattttctatctacttgtttaattattgagagatggatacagacgtgtctaaggttgattatagatttgtttatttctctttgtaattctattattttgctttatgcattttaaaagtttactattagggcacataaatatttaggattgttctttcatcttgatgatttaacaccttgctataaaaacaatctttgcgatccatgataatattctttgctctgaaatatactttgttgttaatataacaatttcatttttctcttgactagtgttagtgtggtgtatctttttccatctttttacttttaacttatttatatctttaaagtacagttcttgtaagcagcatatattagcatcctgattttttatctactctgatagtctgtctcttaaaccatttatatttaatgtgcttagtgatgcgattgaatttaagtgtaacatcatattattgttttatatttgtgcttcattattacccttttcttcatttatgccttcttttgaattaattgagtatttaaatacattctatattttctcctctgttggttgttactttttttggctttaattctgttttgtgattttagtgactattataccactaactttgagcgatattatactacctaacatacagtagaagaacttaacactagtatagttccatttctctctttctggcctaggcttcttctcctgagattcccagctctgagctcactactctaggcttccctggaagccatcacctcctgtgtcagagcacatcccacacggcactttctttgcctgtttgaaacatgtatgtggccactctaagtaataccatcagaagttggttgagaagctcagaaagatagaggctgatagagaggtaagacatgggatatctgatgatgtctcctagtaagaggctagggtggcaaagacaaagagttgaaacttatatggcagaatcagagctcacaatggtgctgggcatttggggttttgagtcttctctgaagatctttgacatctttagctttattctacaggccacggggaactactggatatttgaaagaaggaatttatctgtctatcttctatttatctatctgtaatctatcatctaatctaggaaatgatagatctaggaagatgatagctagataaatatcagtcatcttcctatcatctgggaaatagatttattttgttttattattttaattaattaatttaaaaatgtttaaattatttttatttttatttattttattttatttctcaattacactttaagttctgggatatatgtgcagaatgtgcaggtttgttacataggtatacacatgccatggtggtttgctgcacccatgaacctgtcatctgcactaggtatttctcctaatgctatccctcccctagcccccaaccctccgacagcccccggtgtgtgatgatcccctccctgtgtccatgtgttctcattgttcaactcccacttatgagtgagaacattcagtgtttggttttctgttcctgtgttagtttgctgagaatgatggtttccagcttaatccatgtccctgcaaaggacatgaactcatcctttttatggctgcatagtattccatggtgtatatgtgccacattttctttatccagtctgtcattgatgggcatttgggttggttccaagtctttgctattgtgaacagtgctgcaataagcatacgtgtgcatgtgtctttatagtagaatgatttataatcctttggttatatacccagtaatgggattgctgggtcaaatggtatttctggttctagatccttgaggaaccgccacactgtcttccacaatggctgaactagtttacagttccaccaacagtgtaaaagcattcctatttctccatatcctctccagcatttgttgtttcctgactttttaatgatcatcattctaactggagtgagatggtatctcatcgtggttttgatttgcgtttctctaatgaccagtggtaatgagctttttttcatatgtttgttggtcgcataaatgtcttcttttgagaagtgtctgctcatatcctttgcccactttttgatggggttgtttttttcttgtaaatttgtttaagttctttgtaggttctgcatattagccctttgtcagatggatagattacaaaaattttctgccattctataggttgcctgttcactctgatggtagtttcttttgctgtgcagaagctctttagtttaattagatcccatttgtcaattttggcttttgttaccatttttttttttttttttttgagatggagccttgctctgtcatgcccaggctggagtggagtgaagcaatcttggctcactgcaacctccacctcctgggttcaagcaattctcctaccttagtcttccaagcagctgagattactggtgcctgccaccatgcccagctaattttttgtatttttagtagagtcagagtttcaccatattggccaggctggcctcgaactcccgacctcaggtgatctgctcgcctcagcctcccaaagtgctaggattacaggcgggagatagatacatagatacatagatagatagatagatagatagatagagcaaatggtgttttatgattaagcaggggcaggtttatagcaagtgactgtagttaaaggttactaaggaacaataagaattaagaaatgtgagagggtgaggcctggacaagaaggtaacctaggacaggaagaagcagacaaggcaagagctgtgccagcatatcctgggtggctcttgaggctcacactaccctagcgtatgtttatttatgatatatcttatatctctttccagttttggaaggccatcttgtaacttaccaatgaaattttatcctttagcatcaaacacagatctgacacctgtgacacaataatgttaatgtggaaatataaaagagaatgacattgacaagaccaggatgacatttcagtcttgtgtacctggaagagcaattgcattatataaaaactaagaaggtaagggtaggagagaaactttatgggaggaagataaagtgtttagctatgagtttgcagcacagggttcagagggaaatattgggtagccagctgggtctatggtcttggacctcagcagagtagacagggtggggaaatgacagaggaggtgcagaggaagcctgggaactgatacatggacaggttttggtaaactgagttctgggtgaacccttctgggcaaaatccctcccgactaaattccttcataatttgtatattacattccacaactaggaatacaaaagtgtactacctgagtattaatgcgtgggttgatctgagtggagcagcacttcctttttggttttatgggttagaaggcaggtaggtgctgggtgtgcatgaaggtggctgaggctccactggagagtaagcacctgcagtagtcgcacagagactgggaggtcagctccaccagcatagccttggttcccaggctttgcttctccaaacataaaggcatggagagacttccagcccgcacccaggggctggcaccagagatgaaccacgcagaggtgtgagcactttaaagctgatcagctgcttcagaaagtggcccttcaccgtgatgcctttagagaatggctggaaagtctctggtactttatggacgggcttttagcaagatttagagcactggatgaaatactggctctgtctgaacttacattggagaccttccacagatggtgtttttgtgttcagtgtttcagagagtgagttcattagttttttccttcacttcctcttcccctttctttttatgttatcatagcctcataggtggtttaacgaagtgtgagacttttcaagaggaaattttggatctgtttctctgaagaggcctttgaattatacccaagttccttttattttagtaagctacaaagcatccatatgtactgaatgaaaacatattatgtatcttagttctaaaggttttcatcttggtagggctgaagctttagagaaagccatgtgctaactgaaatagttctggtgctcccaggctctgcgcattctctctgagtcatgacatgcttcgtttccagactgcctccctctgcctaactcatctttgttgttgcagtaggtctgccacgcagtgggtgatgagcactcacgtactgaacagaaggggcttaaaaggtggcgttttcccattccactgaacccacgatgttcatgctgcttcccaggtcttcgggtgatcaccatgccttgaatctgccccgagctgctcttccagtgccccagcgcctgcttgaaaggctttgtcttttcatcctatctttaattcttgctataggcagtgtggagtattgcacgtaagggatggttcatgaaaatattgtgctttcttatattcttttaatggatattttgagaaacatatgtaatgtttttaacagtaaaatagaggttaaatgtaggttttcatgaaatatttgaatatcttaagaggcaatgaattgacacatcatttcctctctactcttctctatcagaaggtgtctgaattcagtgatgggtgaaaattctgctcattctatagatttcagcatctcatcaagtcatctacctctctctttcgcctgtgtcagagacagctcagtggcgcctggttggagggcgcctccctgtcttctgctgcttaccaaatgccctgttggagagcgctgagcaccttctcctgagaattacacttgtgttttcaattttcactagatctgctcctgaaacccctcaaagattgggcaatgtctagattttggctggaagcagatccgaaatatttcctgcaagaaggggaaatgttgttgggtgctagctttgatgtgttggttcaagaaaggaatttattcttcactgaaagtgttgaaattgcattacttcgctttcgtgataattttttttttattacactttaagttctagggtacatgtgcacaacgtgcaggtttgttacgtaggtatacatgtgccatgttagtgtgctgtacccattaactcgtcatttatattaggtatatctcctaatgctatccctgccccctacccccaccccacaacaggccctggtgtgtgatgttccccttgctatgtccaagtgttctcattgttcaattcccacctatgagtgagaacatgtggtgtttggttttttgtccttgcaatttgtgataatttttaaatgtcggctttgtcgtctgggctccattgcaatagctcaggtgctgagaagctctgggtgaccctgggctacctgcacgtctcgagtgtgtgtctgctctgtcaggcatcgactgtgtggggaacagaggagggtgttgctgatatctgaggtcatgggagacccaagcttcgccttcctttctctgcagaactgaagcacgagattcacgtctggcgcctgactgctcagcgcatcagcccggccagccgcgaggagacagctgtgcgccgcctgctgctggggaaggtgctggcactggagcacctgcgtcgcccggaggctgcacaccttccacaggtaccgggcggggtcctgctcagactgtgcttggtgtgcagcagaacattccatgggcctacaaaatagcgacattagctgtatactaatacrtgatatttaggtgacgcacactgtgctaagcctcttatagtacattttatctaaccctcactgagctntgcagggggtacacagccgagtttaaggaccaaagaaacaacacaaaaccagaggctcagagaatttgagcggcgtgcccagggttgtgcagctcggaaggagtggcactggggatggggctctcactgtcaaccgctgggctgtcccatctctctacattgtaattgttgcacgacaaaaaccaaaaaccattaatgcaaagactaatttgacaaaatattctgccagcagttgattttcaggcacctgcaagaatatgaaagccccactcaatttgtttcctggcattcgttgttaattgaagctgagatttaaagggtaaccatgaattggtggtttttctccttgctatgacatgttgctgagttccaagcagtctttgttctggaagctcagacagaagaagcaggagcctggtggccccccaagggatgctgaagctgaagcgtccccacagctgagctgagagggggtggagatgtccatctaggcaaggggaaatgtgaacccttatgaacaaaatctagaatggtcttgcctgttgccattcgctgtgcactgaggggtcaccctgcatgggtgtctcaaggtctggtctgttagtgggaggattcacaggcagtcacatggagtcccacacaatcccgggatgaagtgccggctcagtgccattggcttcatccccggtccgggacccatctcgcccagtaatgctggagcagcaggaccagtgtcctcaggccacagggaggccctgagttacaggctggggaaagaatgaccaactttggcagcaagcacagatcttaaaggagacgcttcataaactaaagatggaataaattgtgctggtgttgggtgttaaagacacactcagtgcatctcaggttacaaacatgaggaaacatgtgggctccgaggctcaccacgttcccatcagctcctctggtgttagtcacacatgaggaaacagacctggggagggcgtggcttcccaaggccacacagttgctgagaagcagattaccatgagggtgtcctaaagcaaggtcgagctctgcaggttttatttttttgagacggagtttcgctcttgttccccaggctggagtgcagtggcatgatctcggctcactgcaacctctgcctcctgggttcaagtgattctcctgcctcagcctcccgagtagctgggattacaggcatgtaccaaccctcctggctaattttgtatttttagtagagacggggtttctccgtgttggtcaggctgatctcgaactcccaacctcaggtgatccgcctgcctcagcctcccaaagtactgggattatagatgtgagtcaccacgcccgtcctgcaagtcttatttttacattttctttttaaaaattgtcctcagaatcattcgactgtgtctgctgtgatttcttacgacccagactgcctgtgtggtcagcctcttttgatactaaaactgcattcttcattgtgcagccccttttccctaattggtttgggaggaagtcagccaggaggggtgggctgagtcagaaacatgaaaaagaagaggcaagtgggagccactgaaggggctgaaacaggcgggaggagaccaccccggcaggagcagcatggacagaaaagacttcaaagctgatcttccccaactgctggcctcaagtgatccttccccctcggccccccaaagtcctaggatttcaggcgtggaagtgatcatcgattgataaaaaacaacattaaagcaagtgacatttcttttaccacgtttttctttagttggttgtaatagttgtataggttcagtgccctcattttggaaacaaagagattcaggaccgtagaagtgtgcataaagaggaaaataaagagactgacggtcgctgccctcctccacgcactgctgcggggttttcgtgaagcttcccctgcgcaagctgtcacatgtacctcctcacacacactcctttcatcattcaggtcattatatgtatttttttgggaaaatagagagtgagcaccttttccagccaacaaatgaagccccaccggccccccatgactagtcctgccagccaggctccaagtcacagaccgcgtccaggcacgaagcgctggggactgctgctccgcgatctcaccacgcagcgtgaccagggaagtaatgagtctcttcttttctcttttagacagatctcacaggaggacaaaaattgggagaccaatatccaagaactccaaaaaaaggtacccagctttctttcctcagggatttctgattcacttctccaagaagagagtgagtgatgccttttccttccctcacgtgactgaatgccgtttctctttttatttctgtggttatacacaagacgttgaggtttatgtgtgtgagtggatggggaaaaatgttttctggatacagcaggctgattttgtgaggatgtggaaagcaaacatctttatagagcctttccctgtccctgcacgttgcagggcccgccctctgncgggtgtccctgaccaccagcccgctcctggccctgaaggcaggcccaaggttcacactttgcggaggggagaccggcaaggcatgctgcatgaagtggagcagctttaggggcagacataggatgcgtgagtgtgctgccgatggctgtgacttcctggggcagagcttgttttcttttgttttgttttttttggctcattcttccatgggggtggactttctcagcccatttatgaacacagaggaccccttcccagtcgagagagctctgctcaagatctgctaggagtcatttgcatctcagtgacatttcagatccatgcagtttgttttctagggagagattgaatacccactctaattttgatgggcacactctccatgcgagtcaggtgtttcctcaaagggcttcagaacacctcacatctatcgtgcttattttccataaagatgttggatgcaatctgatgaggtgcctcagtgccttcacactctgtcccatgtggatggccagggttagaaaagaaaggtatagctgtgatactcttgcaggccccaagttcatacagattatgcctgccttgctagactgtggtgttttagtcatgagttggagaactgtgtgcctctctgtacacctggacgaggactacagtgagatgaaatggagaggtaaggcttggcaacatccctgtatcacatctaagaattcttacagaaatgaccctaggtgtgtgtgtgtgtgtgtgtgtgtgtgtgtgtgtgtgtgtgtgtatgccatggaatactactcagccatagaaaggaatgaaataatggcattcacagcaacctggatggacttggtgaccagtgaagtaactcaggaatggaaaatcaaacattgtatgttctcacttataagtgggagccaacctatgaggacacaaaggcataagaatgatataatggactttggggacttgaggggaagggtgggagtggggcgagggataaaagactacacattgggtactgtgtacactgttcaggctatgggagcaccaaaaatctcagaaatcaccactaaagaacttacccatataaccaaacatcacctgtcttcctgaaacctattgaaataagaaaaagaaaaaaaaaagaaaacagaaaaaaagaaatgacctcaggtatccagaaggagcaaatttgaatgatacccccaaaaaacctccacttccatgagctgcaggatgctggaatgctctttgacctgcctactcctccacctccaatctttgcactggctgtggcaatagccactttctgtggttgctgcgacctcagggaaggtttgcagtgcctcccctcatgcctggtgagaatccgcatcactctcctctgagcatttcaaatctttttcctgccatgctcctttggccctaattcttcagcacagaatcatgtaggaaaatcggccttccccagagaggcgacagggaagatgagaaggggctggcccagccatgagccttcacggtgggcagggaggggcagatgctcaccagtggccccactgcacatagaggaggggctgtgtcagctgttgtgacacagagggccttgcatgtgtttttgatggcagcagctttacctttgtgaccagaggaagcaagagagagaatctctttgtagctctagctctacctctgtgtgtctatatctatatatctatatgtctatatctgtccaaatccagatagctatagatcactatgatggtagatatcgagatccacctgcatccatgaagctacagacattgacattcatcatcattgctgtctccatctaatccacctagacagattagacagatgggtagacaggtgtgctggtgggaccagactcaagaaaggatctgatgcttgccaggcgtggtggctcacacctgtaatcctagcactttgggaggcagaggtggacgcattgcttgagcccaggagttcaacaccagcctgggcaacatggtgaaaccctatctctactaaaaatacaaaaactagctgggcatggtggtgcacacctgtagtcccagctactggggagggaggctgaggtaggaggatcacgtgaccctgggaggcggaggttgcgttgagctgagactgtgccactgcactccagcctgggtgatagagtgagactgtctcaaaaaatgaaaatgaaaataaaaataaaaataaataaataaataaatgaaagaaagaaagaaagagaaaggacctggtgcagttatcctttcacacagtgggccggcattcacacggggaccttgttaacagggcaggcctaccaggtgcccatctgtgcgtgcttccctgccctggccccacgcagccatggcctgtggagcacagtacccttgggcctcatagggagagccccgtctcgtgccgtctcctaggtactcctaggttgatggaggccttgcggaggatgaggtgcctcggggcctgccctccccctatgaccaggtggattctcgcgggtgtcattccagcgctaagagtgcaccccctgcattccaggggcctcatgcatgtcgtgtaaagaacagtgccagagccttatctgggagtcacagttccgtgagaaggctcagctcatggccccacccgcatgcttggcgtggtagagaaaggaacagtgaagacagcataggcccctgtagaaacgccccgtcatcctctgatacctgccggccaggtgtttcataacagggctgtgctactcttgacatctgtgtttatctttcataaagattttgaatgcagtaatcctgaatctgtacgggtttccttgtaacacagtactttgccattttctttcaagttcgagaggttacatttttcatcctcgtgaaatctgtcgtgattccagttgcgtaggttatgacacgctgcaggagtcagaaggttgtgcagagtaaatgagctgtggtttctctcttacagcntaggatatctgacgggattctgctcgccaaatgcctgacagtgttgggatttgttatcttcatgtttttcctcaattcgtttgtccctggcattcatcttgatcttggtgagtctaatttagctttggttcataggctttgtcacattctgnatgggaaggtttcagagcctgttcccagacactgactttgcccacaggcagccgggctggtggaaggccagagagggctgagatggagggtgggcagcctgccctgggaagaagggcgcctttccttttggtttcctgggcaggagggagggagagagagatgcatctctggccccttagactctgtgccatgggtcctcagcccctccagggatgaccatgaggaggaatatagagtgggcactgtcctgtctattgtagttaataaccacatctttacatggttcccagaagagatggagccacatgggcaaggccagcgctgccatctgtgccgcctaccatgccagttaggtgacagtctgttcgggagagccctggcgaatggccggtgctctgcagggcccacttgccttgtctgagggtgcatctggcgcatgaaactgttctcccaccgtccaccattggtttctcttctcccacgttcaccacacccatggctctcagacctctccactttctctagcctgtgttgtggccaggacctatccccacctgagatgtggctctctcagggggagctcaccacagagcttgtcaacccctggcctcctccaccctccataaacgttctccactctcccaggcgtttcttatcaatttcacagttatctccattggtatccttattgaaaacaaaacaaaacccaccccacatgaaagtgtaggtttataagaagcataaatttgaggtggtgtcacagtcttttcttttaccaaagctttacccatagttttccttcaaaagtgagctctgctaagatggttaaaatacccaacttttatcttattttgtataaaaccttggttcactgtgaaatttgaggagtgcagctgccgtagaaagtgaagcctcttaattttgtaaaatagatggataatgcctcaagcttcagcgattcgcaccacatcattgcttccggggttcctggaaaccatcagacattcatgggctagaagttggtcttccttttctcttatgtaaaaaagccgcatttctagattctcacacaacacatgatgtatgtgcttttgactggagttccagctttgtgttatgtatttgcagcccctccatttctttctcttgataatctcaaatccaacttgccaggtggcctgggcttggttcaagctggcaggtattatttatccacacctgagagctgatctgcttggaatcctgatgaggtaatgatccaaagctggagtggtaacgattttgtgaatttcaattgtatttggtggattacatctagaaattgctgcagtgtaattatttttaattacgcctcaggcctaatgtaattttaacattagaaaccttaatgactacaagaatgttacgtggtcaccactggtaattaaacaaatttaaaaaactagtgttttgtgggcagagaggttccattaggtgttcacagataattttgctcctgattttatttgagagtctactttagaggaacatagcaggcattttaaaaactaaaaagatataagagcttgcattcaattttattaacatttggcaacagtctttgtattaaaaacaatactttaatacttaaagtcacatctttaactatatggacttaaaaaatcttggttactatgaaacttttagcctgcaagtctacgttttttttacaaaatgtctcatctccttttgtgtggttgttacatctgtgaatgatggacatgtttattttctgcttttaaatcctgttttgtttttagttagggcttgtgttcaggtgattttatctggggatccagatactgcatatttatcaagataggttaggttgactaggagaaaagtttgattggcatatattttaatggaatacagtttccttagagttataagaacttttctgatagaacaagggcaaaatggatacaagatcttcccgggtcttcagccagtagcaatgtgatcatttatctttggtgaagttctgttttctttttaatttttttaaatgtaacagtgtttttttaaatttttttgagacagagtctcactctgttgctcaggctggagtgcagtggcacaatctcaactcagtgcagcctctgcctcctgggctcaagcaattctcctgcctcagcctcctaagtagttggcattacaggaatgcgccaccacacccggctaatttttgtatttttagtagagctggagtttcactatgttggccaggctggtctcaaactgctgacctcaggtgatcctcccgcctcagcctcccaaagtgcggggattacaggcacgagctactatgcccggccagaagttctgttttcaatgtgtcctgctgtgtaagttgagcctcgttcaatgtgatgtcatatgatatgaaatgatgtcgtatcacacgatgtacatcatgtaacgtgacatcatctaatacagcgcacacactgtacactacgtgacattataacaatgtaatttcatataacatagggtgctgtcatataaaaatgtgcattgtgaaacaaaatgtgacatcagataacattccttcatttaggaatcctaacctagacatagcattgactctttctctttattttttttttattatcatagagcaaaactgacttttcctttgaatgtagcgttctttggattttaacacataggtaggtttgtgtaactgccactgcagtcagagcacaggccagctccgttacagaactttctcagctgtccttttgtagccaccctcccccggtcctggcaaggactgatcttgtctccatcactatggttttgtgtttttggggctgtcatatacatggaatcagatcgtatgccacctttcgagactggcttgtctcacacagtgtaatgcctttatggttcacccaagttgctgtgtgcatcaatggttcatgtttggccgggcacagtggctcatgcccgtaatcctagcactttggaaggccgaggagggtggattgcttgagcccaggagttcgagaccggcctgggcaacatggcaaaatcccgtctctacaaaaaatacaaaaattagctgggtgtggtggtgcacgcctgtagtctcagctacttgggaggctgaggcaggaggattgcttgagcctgggaggtggaggttgtagtgagctgagattgcaccactgggctcagcctcgatgacagagccagactatttcagaaaaacaaaaaacagaaaacaaaaaaaccccaaaaaacaaaaaaactactccagacacttctgagcacatggttttctgtgaacttagggttttattctctgggttgatttccttctcttgagtggcactgctgtgtcatatggtgggtgtagattttattttaaaagcagctgctgccctgttttctagcaaggccaaccccgttgcgttcccacagcatgtatgggagttccagctgtttcacacccttgctggcacgtggcacaatgagaatccccctggagttccgcagcaccttatgcaaaccttaaatatattcttatgatttctttcctcgtctgtcctctgtcctcccccttcccagctagactcaaggacatggtctgtgtgtctgcatttcccctccctggtgcctgctgctaatgcctggttcattagtagaagcaaggtgtaggttctcaggatgcacgaacaaagttctcattgctgctcacagattccaacttaactattgtggggaatttcctatgtggctgacccagcctggggcacagcctgaggcaaaggctcacatgtgtgttcttcatccgggagcttcaacccagagaagaggagtgagggatgggggccgggcagtgaggagagtgagcgcaggcaccactgccccagcgtgctggccttcgtgacgggccactggggctccatcctgcaaggctgcctgagtggaggtaccaaatgcacctcagggctgtctgtggggttgagtagagcaagaaggaatgtttactggctggtgcgcatggcccattggtcatagctccttcccgtgggatgccagagtgcatgtgtccagctgcatgtgccgaggccatgcgaccgcacccgcagggcggcccaggcagagaaggcatcaggggcatgggctccagggcagaccttccaggtgcatctgtgtgagggttgtcgggccacacggagctggctgtggtgacagagaggagagccctgagggacccaggggtgtgcaagaggtggcacaatggcaaagaagggtgagcaagggccagggtcacagttcacacccatccggtaaagaggtggctcccaatgtgcagggaccatcacctcacagcacagcaagaccaagcccagcctgggcgctggctctgcagaggtctgcagtgcctgcatgagacccttagtgccagatgggtttcacaggggccaagggagagctttccccttgggcctcttgagttttgctgaaaaaccaactcacagaaggcagagtaataggagaaaaggcaaacacattcatttaacatgtgtacacaggagccttcagaatgaagacccaaagatacaggagaaattgttcatgttaaagcttaggttcagccaagtgtggacagccatgtagaaatgggattggagaaaaagtgtatgattgggtactgatagactgagtgggaaacccagcagggcctgtctgtccagggtcctcctggcctctctgagcggcactccttccttctgagtgtggggcaggcccctttctggaatgggagttgtaggacccacagtcaaacaaggcaggccagacagtttcttcatggccagttttcacacagaaaggcagagggaaaatgagaataacactttagattttatggctggctttgcagaaaaggattctggtttcaatgacctgccttgggaaagattctagtgtctttggcagtctcaggggagaatgggactgagagatgggcaggcaggaggacggcagagaaaacttttccttctgataaaacaaaaacttcagccgaattaaatgtaaaggagtttgattgaatgatgaacgattcgcaaattgggcagcccccagaatcacagcagattcacagagactccaggggtgcctcatggtcagaacaaacttatagacaaaaaaggtaaagtgacgtacgggaatcggaagtgaggtacagaaacagtgacattggttacagctcggcgtttgccttatttgaacacagtttgaacatacagcagcctatgagtggttgaagtatggctgcggggattggctgacactcagccattgttagaggtgcatactattaagttaggttttcgctttgtctgactattaagctaggttacagttcatccacaaggactcaaatagagaagtacagagtccttctcaggccatcgttagcttgctttaacacttctgaggccttcattttggggtattgctttctgagccccagaagtttcaaaattcagatttttttatgtgttttagaaagataattcagtgagcatactgaattttggatataatgtaacacaccctgagaggttcagggccagcaccctgtcatccgagcatgatttctgcagtgaaacatgaatatttacacaaagtgggacaaataaagactgcaaacaacctcattcctattcaagtcagggttttttgaatttttttacatcaaaatatatagaaaaagtttgcttttctgaaattagggtttcaagattgtggataactgattatgaacctgtgaaaagaatcagcgaggcaggcttgaaaatgttatctttggccttaaaattcagagccttgatgagctgtttcctaggcctcctcctttgataattagttcagaatgtaccccagattctctcatgatgtgtttgattagatttcagttctggaaaattttccgtcattatttccctgattatggttttgaaattgctggtcttctccctgtcccttggtgtccctctggttgagcaattttattgttgtctttgtgaaagtatttttagctacaaataaagcaatctattggatctgtcttaagcaaaatggaggattattagaataataacaggctgacaggctccaaggacactggggcctcttgggggcaggctcaggaaggaggaagggtccggatggagggcgcccacccaccccggcatctgcagtgctctgccctcagctccttgcttctccgtgaccagttagtgcatcttttttctgctcatggcagaatagtgcttgcctgatcagtttcccagtttataggacctcgatttcagccacacacagagaaatggctattttgaacccccaatttccaggcgaagaggagtctgcttggccttgttggtttctttcatctcctagcacaggaaattctgagcaggtggacgggaacaagtggtgagatgtggcctggagtggctgaggcatacttcttagaggaggtcactatgagctggacagacattcccaaggcttcctaatatatgttctatgcactctagtttctagtaagattcatttcagctaagccattcacatatccatcctctcacttattcatgcatttgtacaacacatgcaggcagtggcctaggggttgattggggctagtgtggtgaacataaaaaccatatcgctgctctcctaggtcgtcttctctagaggggagatggatctatatttactctaccagggactcatgtaactgtccagcgggttcctcttgcccactgctgaggtagaccagatttatggaggcagagttgttgcagtagggaaggagttttacccatgtaggacctggctaaatggaagacgggagttgtattattactgaaatctgcctctctgatttggaggctagggcttttcaaggacaattttggggaagaatggcggggagggtggttaggcaatgggtgcttgctgccaattggttgagggtgtaaatcataggggtgtgggaaatggttctcctgcatgcagagtcatttctgagtaagccacaggagcagctggccagtccaggtggagccatcagtctcaaacatgcaaaaaccctgaaaacgtatctcaaaaggccagtcttaggctctccaatagcgatgttatctgcaggagtaactggggaagttgcatatcttgtgacctccagaataatggctggcaatcttctatgtctacactttagcagaattcagtctctcctatcctcctagcctggtgttctttgattagctttacaaatgcaattgagttttggggaagggctgttatcatttaagctataaactaaacgtctgccaaagttagcttgccttaagcccaagaataattgagggcagcttgaaggctagaggcaagaaggggattggatagatcagatctccctcactgtcataattttctcactgatgcaatttttgcaaaggtggtttcagtcacattagggccagcaaggactacacagctaatttagacaccaagaccttcagagctctgatgtggagacaagccaagggtaccaaatggtaaagccaaaaacgataatttccatagtcaaggtgtcgatgaaaagagtgaaactctgtaaattatttgaagagatctattctgaggcaaaaatgagtgaacacggcccatgacaccactccaggagatcctgagaacatgtacccaaggtggttgagttacagcttgattttatacatgttaggaggacagaagttacaggaagatattcaccaatacatgtaagttgtgtattggttcagtccggcaaggtgcgacaactcgaagcagggggcaggataagggcttccaggtcataggtggattcaaagactttctgattggcaattggttgaaagagttattatctaaagtcccagaatcaatagaaagaagagcctgggttaagatatggggttgcagagaccaaggttttttttttttttttttttaaattatactttaagttttagggcacatgtgcacattgtgcaggttagttacatatgtatacgtgtgccgagaccaaggtttttatcatgcagatgaagcctccaggtagcaggtttcagagctcttatcagacctaaaaaattaccagagtcttagggaaaggttttggaaagggaaggggattctctacagaatatagattttccccacaaaagacaactttgcaaggccatctccaaatgtgtcaaagaagcgtattttggggtaaaatactttgatttctttcagggcctgctgtctgtcatgtgatgttatactagagtcaggatggaatttggtatcttattgctacatctattctatcggtctgaagatccctgttttaatgtgaatgctggtgagttgtgtctgaattccaaagggagtggggtacagtgaggcacggctgacccccttcatgccctgaactagtttttcagatttctttgaaatgtccttggctgagagggggtccgtcagttggttgaggggcttagagatttgtttttggtttacaaagttacagatgaaaggcctaatgaaatccccaaaagaaatgaggagctcttactggaaaggctttggcatattagaaaatagccctgatatatgtaaactatttaaggcagttattacatacagtttgtgttaacctgataataaaaatatttacatccctggatggctctattctaattttcatcaaatattcatcttagatgaatgtaaatatccaagagattatttcagaatgatgataaatataatataatgcaatataatataacataatgtaaagtaatataatatggatcttggatttataagtcaattagaataattagctgctttccttactatcctcaccgtgggtagaattaccaaatttcatcataacactgaagaaatgaaatcatgggggagagagaatgactcagttttttaaaaatggagatatagaattcacacaacataaaatttatcttgcaaaattatatcattcagtgtattttagtatattcacaaagttgtacaaccattgtcagtatccaattccagaacactttcctcattccccaaataatcctatacccattagtagtcactcacacactgcttcccccctttccccaacccccagaccctggaaaccactaatcctactttctgttcctggatttgcctattctggacatctcatttaatggaatcatttaacatgtggtcttttgtgtccagcttctttcacttagcataacattttcaaggtgcatccgtgttgcatcatggattagtgcttcatttcatttggctgtatgatattcatatatatgttttctattaaactatgtatattatatatgtatatcatatatattatgtatatcgtatgtatatcatatataatatcatatattatatatagtaatatataatatgtatcacaatttatttatccatttattagctgtttgacctaggagtggaattgcaaggtcatatgcaactctctgttgaacttttagaaaccctgcctaactgcttttccagagcagatgcacctttacattcctggtggtaatgcatgagcgttctgatttctccacactttcaccagcacttgttattgtgtgtgtccttgattatgctcatcataccaggcgtgaagtggtacttcattacagctttgatttgcatttcctagtgatgaatgacattgagcatcttttcatgtgcttattggccatttatgaaatgctcttttactaaataacatgtgaacttgttttttccatctgtttggaaatttcagctgtgatttacattaacaacagccttcttttgctatgaagatttgttcctaactctggagcatttttgcccatttgaatctcccttcctgagcatcatgcacacatatgaggatgaggaaggccagtgtctctcctctagttgcttaaaaccgcagccttgccaggagcctagtgaagcatttcatagggttggtcatgattctccacatgcggggattcatcgttggttgcggtctccttttattagctccaaaatgttttcaataatgcagccaatatcctccattgagtacccacaggttaatgaatttgggggtagagcaaatccatttaatgactgtttctcacttcatttttcattccaaatggcttggatcacataggtctgcatataacagtaagactgcgagatttttaaaaggttggataattttgacggagtaccacattagcttttaaactgtggattttcagaaatgttagtggtctctatttgaataaaagtatctgtgagttatgggtgggagagtaaggtgttagatatgcattcatcaagagattgttaacattctcacatcgaatgattactacttacaattttttcattggtcattacccttaagattctacattgtctcaatatatattaacatttttctatgtaaattatattttccccttagcattaataagaaagacagtctttatattcactatagaaaaccaagtctggagaaatcacagctacagaattattagaaatattgggaccaagagattcttcctttcagggctcaggatatccctaactttgcagtcacaatgctaagaagagttaggttgtgtcaacattttcacttgcttgtctgaagctacactgtggtcacatttaaattcctcaacattaataatctgaagaagaatttaaataaattatgagagaatagtgctgtggccattcacttctcaaacttttaataataaaaagcagtttttcggtgatgtttatgatgtgcatttgtggaaattaggtattccattgctagtgaatgacacagttaattggaacaaaactgaacaactgcaaacatgactgacctaatttttctttcaacgtttgcaaacagaccagatgacatatagcctatccatttgatattttcttgtgccggatgtatcaggataggataggctttgctgagtgaaacactggccctgctgtcttggaagcttgacacaaccacactttttcttggtgacatctttagtgctggtcagtagggtccctgctggacagagacactggcgttttgtgatgccaccatagaaacagcagctttcaggatcatcttggcaaggaagagacaggggatagaactgacagctgcctgtaaatgccaggctaggaatgtgtgtctcatttgctcatggcccaatggccgggttggtcttgtggcttcacctaactacagggctggaaacctttctgggggtccagtagggagaagagtgacaggtgtggggagctctgacaagctactagtgaaccgatacacaaaacacctcctacacgatttgttaagggttttacatgatatgatgttttatctggtactttagaatattacatagtggcccaccagtgggggtgactaaaatctgcttggatgctggtgagcatggaatgtatcaatcagaaatgcattctatttggattttgaggagcctgagaagaaagggggttcagtcccaacggcaaagctgtgtgatgtccaagaagagctgggtgtgtttctcagggtcaggctgctctgtggcccgcctctccaggctccatccacatggaatgcagctcactgcagttgtgcagtcagtgacctgggtggttcccgaggaccacaggaaaacctgcaatgaggagtaaacgttacttgctacaagaagatccaagttgtgtggcattctgagaatttgcattccgtgtttaatgcagatactttagctgcttgttcattcacttgttgattcgttatttttgagtgtgtttttacccactcctcactgtgagaggcaccagggatacctgtgaatgaggcacgattcctgaccgtgtctaatgcacctgcagcactgacctgcctctgtgataacgaacctgattctttaacaaagcccaaatgcacaagtgcaaaatgagaattcttaactgcatttagcattatttctttatgcttagttattcttgtgtaaggattactcattttaatgaataaatgagcatatgaaaaggtgctcaacctcgtaagtcatcagtaaaatgcagaatttaaccacaatgagatgacatcattttaagcactcacaattttaattctactccttcatgatatctagggagcataatattcatattttacatatcactgcatttaataggccccgagggtaccagaaattgagtacaaatgttagcagagtcttgtttggagtggtgaataatactcatcataaacatggccaacatttcaattaattttttaaaagtagaggttagaaaatcatttgatattgagacctaaaatagtgaaaataaaagtaagttaagaaaacagctatgatgccttcctttcttgctgacatttttatgagtttgtcatagatgttctagttcacatgagttttaacagtcaagaatatgaagctcctcagagcctgtttgattttcaacatgtttcaaagatgcttgagaccacagaagagctccaatgttcagttaagctctggttggttcccccatggcctcagcaagcgtatggatttagctgagagacccctatggtaccttggtgtgtgaggctagcatagccgtcacaggtccatcacggcagttgtatgtgagctgtcttctccatgagcctgtgcagtcctcggggcagagctcagtccagtccgccactcccaaggccacagagaccatacttgagtgtgctcagggcatgtgcatcgatgcagctgtctctcagtccatcccgggagctcagcctgccactgtctttctctgacaatgtgagtgctttagaatgtgaatgagctggcattcaggggacagcctgggtaactggtacttgtgtttatcaaggacaaaaatcctgcctctgtgtctgtgtctgtgtgttctcattagaggtcttcatatttggtgaaacttaccagcctctaagcacagtaacccttgagtgtcctgaaagttttagttactgccttctaatggcatatttgtagggctgtaccattccctgaccctgccatcacaattttctcccttccatttttggaagtggggtggaatgcatacattgaaacacttttgctgatgaaaagctggaatcagcccacttggtctagtgagcaatgagcctggagtcttgcctctgcaagttgtgggcagaagggctagaatgccgcctggtgagacagggtggatgcttagctacctcctgaccctcatcagatcttaggtggcacgtaagctgaggcaggtgtgtatcttcttcccctcctgcacagctacatgcacttccctccccaacgtgcccatttggtttaagaggacctaatctatgtaaggttcagtggcctctgtaaaatagggatcctgctgagtgtcttcatcacatcatattatgtcatcaaacatctccatgtgactcaactcctttttttgttatgtagctttattgcagcaataacttaccaacataccttacagtctattcatgcataacatgcaatcactagggtaagctggcccatcattttcttatttatatttgtgactcagctttttaaattggatatgaaaagtgctaatggtaaaagattaggttgataactttgactatcttaaaattaggaacttatgtctcaaagtgtactactaaatgagtgaacaagaagccacagagtgaaaaaagtgtgtgcaaaagcatccattgtcacatttggaaattatatctaaaatataaaaagaacatctatagagcaataagaaaagacagaaccccccaatagaaaaatggacggaatcttaagtagacacttcacagaagaagatattgaaattactgaaagtattagtaagcatatgagaaggtgttcaaccttgtaagtcatgagtaaaatgcaaaatttaaccacaacgagatgccattatatgcacacctaaatggttagaaaaaaagactgacagtactgagtgctgaaagattgtggagcagtaggaagtgtcatgcattgctgataagattgtaaatttgtacaatgacttttgaaaatgatttgacagcatctactaaagtttagaacaatgtatatcttctgcttagtaattttgttcacagtggtatgcccaacaaaaatatgtacatttgcacaccaaaagactctctgaaaatgctcatagcagcctatttataatagccccaaactggaaacaactcaaatatcaacccctagaacggacaaatggtgggagagtcatatagtggaatactatacagaaataaaaaatgaacgtattacatgactggatctcacaaatgtgttggccaaaagaaaaatctgacagaaaagagtatatgctatatgattccatttatgaagaactcagaaacaggcacatttactctctggttgtgaagggcagagcctgactggcatcctcggtcatgaaaccttttgatgtggtctgcacaattcagcctctggggcagagaatgtggggggacggtgaagagagagggaggggaaagtcagcagcgtcccctcccccgccactggcctgtctgtattggtggaaatctttatttgaggcaaaatgctcagaaatagaataatctttattctttccaacctcaactcttttaaatgactcacttgatgtaattgaggcatttcctaagccagattggaaaccacgcagaagcttccaggtgttgaatggaagccattagcttcactccgagctttggtgttgcagctacagcgggtatcttgggcagtcacagccactttctgggtctaggagggagagggcagatctggagctcaatcttcctggttctaagcctgtgtcctgcagcacacagcaggtgcccataagagccactgagtgttggagctaggctttaaaattgctgtgaggattgaatcaggtaatacacacaggcctgaagagcagtgcctggtgcacgattgcatgagatatgaacaaacagttcaggctgatggccaagcagtgcaggaagacacgaagattataaaaaatggtctttcttttgctggattttaaagggaaactagaaagaatgggagttttctcttgagagaaagcctgtgcagtctacatgataattgagtaagtagttaggtgctccctccttctgctgccatagcaactgcctgatgcatggtgctataatagaccttaaccccctggtcactcggctccttctgactttctaagccagctcatcccatgtgccctgtcctactcacccacccaactgtggagtgggtgctccccacaaggaagcactgggtttgcaccctggaggttgagtgcttgggtaagtgagagagctagaattacccaaggaacaaccacagtgtagctgtgcaacagaaagtccttgattatttgtgatcttacttggtctatttcaggcagttgatggccagtactcatgtagtacttcatgaaagggtggcaggcagggtggtttgtactgtatatggtatgcacagtccatctgtgggttttcctgtttggaaggatgaatatgagatgagtaactgttgagatactctctggagatgcatcctgtgtgcctcaaggtacataggttagttcatcttaattgatcaggacagtactgcctttggtcaaagtcagttacacaatgtccagggcaaggaactgtacagtatatcttttataaaagatgacaaggtttcaaatagaacaaaattaagttacatttctcagtatattcatccaatcacactgtgacaagagatttgaaataaataaaccagatctgttcataattagcaaaatcattccatcagaagcctgagcatatcagaggaatataacgtggcagcatggaaggaaattcttgcagactggggattgaatcctggcttcaccccagcaagctgtgcagcctggagaaaaccagtccatcttcgggagcctcagtttccccctgggctggggtgctgagagatgcccagcaaatgcctgtgcggaggaggctgctgggggactggtgaaagccctttcctactttcctttgaatcatgttgcccagggctttaggaatgagggaaaagaggctcctttagctatttgttcggcatagaaacttgactctgttggagacacaaatgaaagtacagagccacttatctcagattttttgagttgagaaatggcaaagctcttggtgagagattaatgcccactcgaggaaagcgtttgatagaagctccacaggataaagacaggtcacgtaaatggtactttttatctgtattcatctccactcaactgcatttttaatttttaggaaaagagtctcaatgacacattgttagaatttgtaatagaatgtgaagctggaaactgggatgtttccgtcagtggcttttgcttccagtacactgtggaagaaccactgcctcaccctttgtcagtgtccctgaggagccggtgctgagcagagcagcctggagcattgctcacagggaccggggctgcagtggaaagtgtggtctggactcagagcaggaccaggcaataccaagcagacgagcttatgcaccggcagcctgattagtgccgctggctctgcaggcagtgcgattaaaagtaagagggaattgaggttttgcagggacaaggtcttcattcgattgtaggctattgcagggaatttttctaacaagacaaatctccgtgactatggaaactttctgaagttggatggatgagtgctatagcaggagttttggctggaggaaagctcaggcctccacaattgataagagaaagcagaactataaaaagagccctaaaggaccttccagctttttgtcatgactgaaatttctctcagaatcatggaaaagaacttgtgttcttactgacttttagagagagcttcttattgctatatagcagagaaaacaagggatgccatttctggggtcaaaaagctttacccaggagaagtgaaattggagcaattatttcttactgagaatttaaagaaaagatgtggtgatctgtgttagaggagcggtgaaggaatcaccatcagatgtgatgatcagataagcaagtgtctgtttgtcttctgaactgtgtggtacgtgccctggagaattcaaagaaaagtaacattctggttaggagacaaagctaacataagtagaaattaggccactgcagcctctttgctgagaaatctcattgacttctccctgtctaagactggggtcccaacatttttgcatgatataaaacatggtctgcccttcacatgctaaatgacaatgtccttcccaaccccatcttcctttttaaaatgttgctgttgtagtaagaaaaataatatatcatatgcttaaaaaaatatatggttaaaatggcaaggcttgtgtgatatatatgtatatcacataaaattgtgtatgcatataaagtatgtgatatgtatatgtatatagatatgtatatatccatatgtgatatatacatatatgtgttatgtatatatcaaatacatatgtgatatgtatataacacatacaacttgtcattttaactatttttaattgtacaactcagtggcattaattacatcactgtcaggcctctgagcacaaggctgcaccagatagcctgaggcaactgaaaagtacaaaagaagtgaaacagccagctcttgtcttaattgattgaccaaccttacaacattccgctatgacttgttcctgcgctgtcccaactgatggatccatcgacctcatgacattcttcttctggacaatgagtcttatgttctctccagcatgcacgttgtgactcccgccctggcctgcaagagaaaaaccccctttaactgtaactttccactgcttaccccagtcctataaaactgccccatccctaactcccttcgctgactctcttttcgaactcagctcgcctgcacccaggtgattaaaaagctttattgctcacacaaagcctgtttggtggtctcttcatacggacacgcgtgacaatcaccattaccgttatctccaaaacatttcattaaccccaagaagaaaccctataatcattaagcaatgactccatttcacctcccaccctgcccacccctggtaatctcttaatctaccttctgtctgtttaatgtaatcacatttgtttatttctgctttttttcacttttgctgtcatagcctagaaatcactgccaagtccaatatactgaatattttcctccatgttttcttttaggagttttatagttttagactttatgtttaggtctctaatcgattttgaattagtttctgtatatggtgtaagataagggtccaactttattcttttgcatgcagatatccagtttcctcaacaccatttgttaaacagactgcgattgagtagtcttggcattctcatcaaagatcatttgaccataagcatacgtgtttatttcggggctctatattctattccattagcctgttttttttttctatgccttgtgatttatttttggttgaacactgaacatttgaatattatattgtggtaaatctggaaatcagtttcactcccttccccggggttattattattattttttataatcgaaggctgtagtagtcttgtttgttttgtgacatttccaaactatttttgaaaagactgtattccttgtcatgtatggtcactggaatctctgttccttagtgattgcttactgtgttcggctagtgttttgacacagattgatttgaattccaggagctaaaagcaaacaaaccaccacaacaaaaatacctcttcctgttttatagattggctctgtgctagaaccctccttcaaaacttagccaggcttgcactgagactaggcatcagcacaagctgaaagttttgggaattctccagtcttttctgagcatgggcctttccctaggcatgcaggtggctttccttatctctgcctgcccccaccgccccctagctctgccctgccccgccccatgtttgtttttgaatatctcagtttcacaaagaaactctccccagattttgctcctattcctcaggtggcgcattacatgcttgtcttttccccaggcatctgtggtttggcttgcagtgattttgaacaatgcctgccattttcctggcctaagttctgccttaggtgaaacagatgaatgccttgcttcagtgcctcagctaccctccagccaggttagaacagacattcacaatagtttgtgaataatgctgctcttctctacctgaaccagggagcagggttcacctcctttgtggaaccttctctcagtccccatatattgttatttttttctgggtgctctccagtggttcacatctacctatagtattgcattaagtataacgttatttacatacatgtgttctccactggacggcgaggcccttggaattcaaagtggtgccttgcttacattcccatctgtatcccttaagctcagaggcaggtacagagcaggtttccaaaagtggcatacagaacaatttggatttaggggacattcagtgaggaccagatgaacaggagtgtttcctgatattgtgagacagtggtcttgcaaaagtagacaagtgggtatactttggaaagcaggaggaaccgtaggagacaaaagggtagtttggatacctcttcaaattctatacatcgtattcaataactgtcattgttttccagaaaataatctatatttaagcccttgaaggtagagtaagagtaatagaaataatttgagaaaataagaacagatcatttttgtttttttttttaaatgcaaggtacaggctgggcgtggtggctcacgcctgtaatcctagcactttgggaggctgaggctggtggatcacctgaggtcaggagtttgagaccagcctggccaacatggtgaaaccccgtctctgctaaaaatacaaaaaattagccaggtgtggtggcaggcacctgtaatcccagctactcaggaggctgaggcaggagaatcacttgaacctgggaggcaaaggttgcagtgagccaagattgtgccactgcactccagcctgggcgacaagagcaaaactccatctcaaaaaaattaaaaagaaaaataaataaataaatagataaaataaaatgcaaggtatagaattgtcaagaactgtttaaaaggatacgttatccatccaggtaattcttatttaagagatttttttttcccctcaaatacgtaaacaattgagatcttagtactttttttgttttgttttgtttttaaactgaatagtattctgtttctcctagttgcaagccggcctgatccactctggtcttggagaactcctttatcttttggtggaccctaactgtagtctctaactcttgaaagtgggagatggctagctctgtagtgcttataatgaaagtcacacacataactatcaatcagatccatatttagttgtgagcaggcatatgtcagtttgtgcaacgtgtttggctaatttgatgatgccccagttctttgaacttttagtgttctaagcacatcttgtctacagtgtttactggagacagcaaaaaatattctaagaaaattcagtgaaccttagagttggaatcagagtgtttagagatgaagtgtcagacccctgccctgatgaagagcctggctcagtcaccacactgaggagctccttgagcctcttgatactcgcttactcctgacctcccagcacctccatcctcaggcagtctctgacctgttttctgtcactgtagattaagagttggcaagcttttccataaaagagtagatagaaaatacttgaggctttttagccagacactctctctcacaaatactaaatgactgggttgtggtaaagcagtcatagaaagtatgtaaatgggtggctgtggatgtatttcaataagattatatttatagaaacaagcagggggtcagatttgacccatggactatagcttgtcaaaccctgctatttaaattttctagaactttatattaaaaatggtatatatgtatatttggtctggcttctttcattcagcataattattatgagattcatccatgtggtagcatacatcaataattcattcctgttattactgagtagtattccatggtttgagtattacaccatctttttgtacacacattcacctgttgatggatatttgaattgtttccagttcttgaccatcaaaactaagactacagcaaacatcgtgttcaattctttgtgttaccttatgctttaatttctcttgggtaaatacttgaaagtggaatggtgggttcatattggtaggtgtatggatcatgtttttaaaaactgccacgctgttttccggaatggttgaaccattttacactcccaccagcagtgcttgaaagttcctgttccttcatctccttgtcaacatttactttagtcagtgtttttgattttacacattctaaggtagatagtgaaatgtcattgtggttttactccacgtttccctaatggctagtgatatttgaccatcttttcatgtaatcatttgtcaatcttatgtcttctttgttgaagtgtctgtttaaaatatttcccatttgaattgtgttgtttacttgttgaatttgagaattaaaaatttatatatatatattctagatattagtcttttatcagatagatgatttggaaatattttctcccagtttgtggcatttctctactttaacttaacagtgccctttgaaaaacaggaattcataattttgataaagtccaattaatatgatttttttcttttcatatattatgtttttactgttatgtctaagaaaacctttaactcagggtcagagattttttcctatattttcttccagaagttttatagttgtgttttacattcagacctataatccatttgtattaaatttcgtatatgattagtgagcagatcaaagtaaaagttcttttgcatgtggatatccaactgttccagcaccatatgtggaaaagacttctccttctgtattaaaccaccattgaatctttgcaaaaaaatcaattgaccataaatatatgggtatatttttggattctccattgatcaatttattttgatgcaatatcacattgtttttattgttgttgctttataataaatcttgaggtgagataaagtatattctcaaaccttgttcttttttatttttttataaaagttgcattggttattctagtcctttgcattcttatgtgaattttagaatcagtttgttaatttctacacaaaagagtgctgggatttatacaaaacattcttaggaaaaatgaaagaagacataaataattggagctatatattgtgtttatagatcagaagcccctatattgttaaaatgttaattttccccaaattaattcgtacatacctctctgcttcaaaggagtccaccctgtagtccctgatattaatggccatatatgttatattacatagccaaggaactttgcaggtggatttaggttataaacctccataaagggagatttttctggattatccaggtagatccaatgtaatcataagggcccttaaaaataaagtgaaagatagaagagccagttagagagctgtgacagaagaagaggcaggagagatttgaagtgtgagagggacattgctgactttgaagatggaggaatggaggcatgaggctgggaatgtgggtgcctctggaagctcagcacagcttttgggtgacagccagtaaggaaacaggggcctcagtcttacagctgcagggaactggattatgtcaacacctgaatgagcagagaaacaaatcctcccctagagcctccagacaggaacgcagccctgccaacactgtggctgtgacttcatgagactctaagcagacatcctgctgtgaaccagcatcctctgacctatgaaaatcatgatataattgaaaactagtacacctttttatatctatagcatctatagtcatgccactgatcttcttcttgatactggaaattttgttttctcacttgctctattcagattggctaaaagttgactgatcttactgagcttttgaaagaagccagttttggtatcattgcttttctctaacattttttccattttctatttcattgatttctactccagtctttattatttcttttcttctacttattttgggtttcatttgctctaaccagtaaggaaaaatataaccagaacaattaaacaaaaactttatgaaagaagatatatggatgtcaagtaagtaaaagatgctcagtgttggctgggcatggtggctcatgcctgtaattccagcgctttgggaagtcaaggtgggtggatcacttgaggtcaggagttcgtgaccagcctggccaacatggtgaaaccccatctctactgaaaatacaaaaattagctgggcatggtggtgcacacttgtaatcccagctactcgggaggctgaggcaggaacatcacttgaatctgagagatggaggttgcagtgagctgagattgcaccactgcactccagcctgggccacagagtaagactccatctcaaaaaaaaaaaaaaaaaaaaaaaaagatgctcaaagtcattagtcatgagaaaaatgcaattggaaaccacagtaagatcccactacacaaccattggaatgtctaaaatcagaaaggctgatcaaatgttggtgaagatgtggaagaactggaattctcatccactgctggtgggattgtaaaatgataaaattattttggaaaatagttttgcagtttcctaaagcataaatgttgcatataacattgcatagtattaagctatcatatatccaaccatctcattcctaggtatttagccaagagaactgaaagcatgtgtacatacaaaaacttgtatatgaatgttcatagcatgtttatttgaaatagccagacactggaaacaatccatgtgtccatcaataggtgaatggtatgtacattgtaatatagccacacactagcatactactacacattaaaaaagatgaactactgactcacacaccaacagcgaaggatcttttttttgtttttgagatggagtttggctctcattgcccaggctggagtgcaatggcgtgatctcggctcaccacaacctctgcctcccaggttcaagcaattctcctgcctcagcctcccaagtagctgggattacaggcatgtgctaccacatccagctaattttgtatttttagtagagacggggtttctccatgttggtcaggatggtctcgaactcctgacctcaggtgatctgcctgcctgggcctgccaaagtgctgggattacaggcgtgagccatcgggcccggccaacagtgaaggatcttaacatgattatgctgaatattaatttttttgtctggatgatctgtctattgagaaacagtcagacaaaaaatacaacaggtggggcatggtggcttatgcctgtaatcccagcagtttgggagtctgaggtgggcggatcacttgagggcaagagtgtgagaccagcctggtcaacatagtgaaacctcatctctactaaaaatagaaaaagttaactgggtgtggtggtgcatgactgtaatcccagctacttgggaagctgaggctccccagcttgagcctgggaggtggaggttgcagtgagctgaactgcagcccagcctgggtgacagagcaaaactgtgtctcaaaaaggcccccaaaacaacaacaacaaaaaactatggtgcaatttacagaaaacctgcatttatagaaaatttaagccaatctatagtgaaagaaaagagatgaatggtttactgggagtgtgggggttgacaagaggagctagaggaggtacaagaacataggcatgaataaacttgtgggtcaatgggcatgttcattatcttgattacagtgttggtttcatgagtatacacataaccaaatagaaattatatgcattttacatatatgcggtttgtagtatgacaattattcttgataaagaaaaaggcaaccagaggttaaagaaatgaatcggtgtgttaacagtggaactatatctctatgtctatttacttattttcaggatggattgctattctgggtgccatctggttgctaattttagctgatattcatgattttgagataattctacacagagtggaatgggcaacccttctgttttttgcagcgctctttgttctgatggaggtaagattttagaacttttgccatatggcattttacctgatttttgtatttcatgttttatttggtgaatgaagaaagcctacatctattaatctttccttatattctctaagtggaaaacaatgaaggttgtaattggactattttaagttaaccagctttaccttagccactgagagatttctgacagcactgcgtatttgttttttttcttgaattatctttgtggtttgtaaactcattctaatttcattttctataaaatataatttactataagttgagtttggagctaaattacttataacagcaagtttaggaggtagtgtgaccttgatgatctgtttcattttgtgtgatatttgagtaacatttccgttatcacggaaaagactacatcagtaatatgtattgtttccattacaattgttgttacaaaattactcacaaaatcttgagacttcatttataaatttgtgtcctcctcaaacagaaaggtttactaacacagaaagatactactcctcaaaccatgcccccagcaccacttctttgcatttcttcaatttaacatgtaacgtgctttcattttcattaagctagaaatattttctaattttccatataatttctttttttgacttatgggttatttcaaagtatgttttgaaggctccaaatatttgtggattgcccatgtttctttatgtttttgacttttaatttaattcagttgtggtcacaggacatacattgcacaattgcagtccttttaattttattaagacttgttttacggtctagcatttgatctgtcttggagaatattctacttgtgatgtgtattctgctgctgttttgtggagcattctatcagtgttagatttgtcttgcttgttaacagttctgtttgtctcttgcacattattagtgatattctgtgaaactgttctatcagttattgagagtggggtattgcagtcttcaactattttgttggattgggtatttttcctttcaagtatgtcagcttttgcttcatgtatcttgaggatcggttgttaagtgtatatacttttataattattacatcatccaaatgaattgaactttatcattactaaatgtctctttttctctggtaatgtttttgtcttagggtctatttgcctgatactggtatagccacttcagcccacttttgtttactgtttgcatgacttatcattttaaaaatgataaaatctagcctgacaatttctacattttaattgaaatattcaatccacccccatttaatacttattcatacgcttggcttcacgtctgctactttgctattttcactatatctcatatcttttttcctctctttatcttttactgctttcttactgtgttaaattacattttattgtatactaattctcttctttgtttctatttttaaaactgtgtttttgagttattttattattgattgctctaagggttaaactgtacatcttagtttaatatgatctgtgctggattaatactaacttatctcgtggaaaatacagacattgtgttccagtagagctccatttgtcctcccttgtttgtgctttgatggtcacgtatgttgtacttctacgttatatgcctaacatatataatagttttatcatttcaattattttgtgcaatgtattttatattaagagaaaaaagaaaaatgataaaaaaaagacatacaattgacccttgaacaacatggatttgaactgcatgggtctacttatatggagatctttttcaataaatgtatgggaattttttttggagatttgtgataatttgaaaaaacacagatgaactgcatagcttagaaatattgaaaaaaattaagtcaaagttaggtatgtcacatagaccaatggaacagaacagagagcccagaaataaggctgtacacctatgaccatctgatcttcgacaaagctgaccaaaacaagcagtggggcaggcagtctctactcaataaatggtgctgggagaactggctacccacatgcagaagattgaaatcggaccccttccttataccatatacaaaaatcaactcaagttggattaaagacttaaacgtaaaccccaaactataaaaccctggaagacaatctaggcaataccattctgcacataggcacgggaaaagattttatgacaaaggtgccaaaagcaattgcaacaaaaacaaaaattgacaaatgggatctattaaactaaagagcttctgcacagcaaaaggaactatcaacagagtaaacaatctacagaatgggaaaaaaatttagcaaattatgcatctctgacaaaggtctaataggaaccaaagtctataaggaacttaaacaaatttacaagaaaaagaaaccaaacagctgcactaaaaagtgagcaaaggacatgaatgctttcaaaagaagacatacacgcagccaataagtgtatgataaaagctcaatatcacctatcattagaaaaatgtatatcaaaactacaatgcaatgccatctcacaccagtcatatagctattattaaagagtcaacaaataacacatgctaatgaagttgcagagaaaagagatcacttatacactgctggcaggagtgtaaattagttcaaccattgtagaaagcagtgtggtgattccttaaagagctaaagagctaaaaaactgaattgccatttgactcaggaaatcccattactgggtatatataaaaaaagaatataaattcttgtactgtaaagacatatgcacatgtgtgttcattgcagcattattcaccatagcaaagatatggaattgatctaaatgtccttcagtggtagactggataaagaaaagtggataaagtggtagactggataaagtaaagtatatgtataaacatatacaccatggaacactatgcagccattaaaaagaatgaggtaatatcttttgcagaaacatggatggagccagaggccattacctttagcaaactaacacaggaacagaaaaccaaataccacatgttttcacttataagtgggagctgaatgatgagaacacatggacacaaagaggggaacaacacacactggggcctactggaggatgaaaggtgggaggagggagaggatcaggaaaaataagtaatgggtgctaggcttaatacctgggtgacaaaataatctgtacaacaaactcctgtgacatgagtctacctatataataaacctgcacatgtacccctggacttaaaagttaaaaaaattgtcctttgaaccagttattaaaaaaaaaatgatggtgggttgtgagtggccaggggccaaaataagcacatgggagaaacaaacacagaaacacacacacacacacacacacacacacacacacacacacaccccaaacaaaaaaccacaaaagctatgtcatgaatgcataaaatttttgtagatactagtctatcttatttactcctataaaatatacacaaatctattataaaaagttaaaatgtatcaaagcttacacaaacacagacagtacatggtaccattcacagccaagggaaatgtaaacaaatgtaaagatgcaggattcaatcataactgtgtaaagttaactgtggtacatactgtgctactgtaataatttcacagccacctcctgttgccattgcagtgagtgaggatctacttaagatgctatatggtgctgatcatctccatgagtggttaatcccttcagtaaattgcctattgcagtaaaaagtgatctctcaattcccatgtatttcttggtttactgcaatgcttaaaccgtggatgacacatgggacccatagcaagtgccattagtgatgctggaagtgctctaaagaagcagagaaaggtcgtaacattacaggagaaagttggattgcttgatatgtaccatagattgcggtctgcagctgcagttgcctactatttctgacagatgattcaccttgtaaacagacgatgtaaacttatggtatcgataaacacagtacagtactgtaaatgtagtttttgtttcttatgattgtcttaataacattttcttttctgtagcttactttattgtaagaatacagtgtataagacatataacatacaaaatacatgtttcaggagtttgagaccagcctgggtaacatagtgagacttcatctctataaaaatattaaaaaattagctggcatggtggtgcatgcctgtagtcccagctactcaggaggctgatgtgggaggagcactatgctcctgggaggttgagactgcagtgagccacgattgtgccactgcacaccagcctggatgacagagcaagaccatgtatcaaaacaaaagaaaatgaaatatgtgttaattgactgtttatgttattggtaaggctcccagtcaatagtaggctgttagtagttaagatctgggggagtcaaaatttatacacggattttcgactttgtagggggctggtgcccctaaaacccacaatgtttgagggtcagtttgtgtgtgtgtgtgtgtgtttgtgtgtatctttcctacaattctttacttctttgtatggatttaagttgccacatgatgtcagcctgaagaatttcctttagtagatcttgtaaagcaaatcttttggaaacaaattctctctttgtttatgtgtgaatgcctttattttgtctttttaaaatacagttttgtttcacttatatagaatccctgatagtttttttttctttcaccagtccaaatctgtcattctgacttcgggtctccattgcttcttatgagaaattagctgttaatcattgtttcccctatatgcgcattgagtcatttttctgttactgcttttgaggctttactttgtctttcaatagtgtgactattatgcatctaggtgtggatctttttgtgtttctcctacttacgtgtatgttttttgaaagttttaacttttaagatctttagattaattttgaaattaattttgggtatttggatagtttttggttactatttttcacatatattattctctctttttttaaaaaaaattattctcttccttttctgggattcctattacagacatgttggtttgcttgattgcgtcccataggttttgacactttattcatttttcttcattcttttttcttctatgttcttcagattgagtaatttctattgatctattttaatttttgatgagtaatttttatgtcatctcaattttatgtcatctcaaatattatattgagtccctcatgtaagtgaattttttatttcacttgtattgttcaattccagaatttctattctgttgtcttaaaaataatttttatttccttgtgatattctctacttaatgcatcattgttatcatttttcaatttttaaagcatgattctttaattctctaaacatatttaaaattctgctttgaagtctttcctaacttcagcatccaggctcccctcacagatagtttctattggcagtttttaccccagagcaggggtcacactttcctttattttttgcatatcttataatttttgtaaaaaattagaaattttagataatgtattttagcaactgtagatgctgatttatctccctgaatttgttattgatttcatttatatgaaatcataataaaatgtccttctttgaccctaaaaacaatttttgtcttaaggtcagttttgtctgatgttagcatagttactccagctctttttttgttgttgttgttactatttgtgtggtctacctttttccatctttttcctttcaatctatttgggtcttttaatctaatgtgacagcagtaagctcttgtagacagcatacagttgaatcacatttaaaaaatctatttagcccatatctgccctttaattggtatgtctattccatttacagtttatgtaaatgctaagaaggtagtatttatatctgacatttttctatttgtttttttccttatctttgtctctttccctggcctctctgttaaggcatctgtctttgctgatatcacatacaaccttcaggcttcactaattcccagttgattgctctatttaagtcttaagtttttaagaatagttttaggttcacagcaaaattgaggggaaagtaaagagattttccatatactccaacccccacacatgcatagcttcccccattatcaacttcctccatcacagtggtacagttgttatgatttatgaacctaaattgatgcattatagtcatccagagtccatagtttatattagtgctcattcttggttcttggtgttgtacattctgtgggtttggacaaggtataatgacatgtatccatcattatggtatcatacagagtagttccactgccctaaaattcctctgtgctccacttgttcatcccttcttctcccccagcccctggaaatcactgatcttattcctgtctccatagttttgaattttccagaatgtcttataattggaagagcacagtatgtggtcttttcacattggcctctttcatttagtaatatgcatttaactttccttcttgtcttttcatggcttaacagctcatttctttttagctctgaataccattccattgtctggatgtaccacactttatttgtccacccaccatgacttaaggacatcttgcctgcttccaagttttggcaattttaaataaagctgctacgaacgtctatgtgcaactttttgtgtggacctaagtcttcaaatcgtttgggtaaatatgaaggattatggccagaggataattgcaccacctagagcactcccaagttgctgaagtcctcagcatatattccaggagcttatgggatcgatcaggactattcttgtgtgtctttactacccaatacctagcacctcctcatataattgtgggtatgagagtaatcatgattctttgaggagaactatatgatgtttattgtcttggctattttatttatacatcatgttggatttctttaaattttttctgtatatcttctttatagcttatttcactctccctaattgcttcttaatatttttctcttttatctgtactaacctaggcaattaggggaaccaaactgaaaatattgattcagttaccttgacactgggaaagtctcttttgtctgtcttctcattctattcgttgttatgctgcagtatcccaatgataagtatcaggcagtttcatcatgtgagcactaaaatgggacaatttatccagctgcttcctttaggacctgtatccaatagtgcaggtacatgtagcattggttttattcatattgataagtcagaatacaattttgtaaaatttcattctgttgattaaaaaaagttctggaaactatagggatataatatgttttcaactagaacaaaacaaagaattttcatttgtgactgaaactaatgtcaacaaaaccaacccaacaaagttgctgctttgttgatgtggacgttaattgaaagaggcactttttgtgcagaaaccaacaggaaggatttctgactacaactacgggatgcattcttgcctcagtttccaaccttcatgtttttatttgggtcctcagcagaatatattaatctatcataattacttatatcttcttgaaactcaagaggtgctggacacagtggctctcgcctgtaatcccagcactttgggaggccgaggcaggtggatcatgaggccaggacttagagaccagcctggccaacatggtgaaaccctgtctctactaaaaatacaataattagccaatcccagatactcgggaggctgagacaggagaatcacttgaatccaggaggtggaggtttcagtgagtcgagatcatgccactgcattccagcctaggtgacagagtgagactctgtctcaaaaaaaaaaaaaaaaaaaaaatcaagagggagctgagcttattattattgcattaactttgcttgtcctgtaacattgtatgaattgtggttttgcaagatgttcaataattctccaacttaagtagtctaaaatatggggagttgaggaacaatggaatcttcatgaggtgtaaccttaaggaagccagttcagatgcttgccttccccaggcttccctgaggggcagcctaacactctttctgaaaagtgttagacttttcggcccaaaagggacaatcaactgggcaagatactctgaccgtcctttttgaagtaggaaaagccctattaggagccattttaaggcctggatgctttcaactctgttattttatcctcagatgttcctgttcattttgctcccactcatccttatgtaacaggtcctcaccttgcttcccccctctatgagcagtctgaccatcatcatcaagcttacagacctcattgcagctggatgcagcctctggcataatggggagatggatgggttggaagctttctcatgtgccatgaatatcacaggaccatgagagcactccagtggggatgctcagagatctgcgcaccagtccaggaaggactcttccaattcaggcgaacaggttatagttcacatgatgtttatgagcacaggctttcacatcagatggatccatgttcaaagctcagctttgctacttcctagttctaaaattttagacaaattacttaatacctctgagcctcaattttcttatctttagaatagtctattaatattaatcacgctgcttgtgagaaccaagaagatcatatagaagtactgagctccatgttgagctcctagttggcattcaaaaagtgctatagcctattattattattatcatttttagtaataatttgattcaaaagcttaattcaacctattcatgttcaaactattcactgttagcccagaagagagtaaggtttgtatacagaggtcctaggcaaactctctgggccccacagatctcacacacccagctcccctaccccaagcagccattcccttcagagtggcctgccttcatcttcacgccctgggctttcatctctcgttttgcatctgctatcttacacctacctaagacctcttccacattttgagggcttcctggcccttttcctgccattttggacctgagttctccagcgtacgttttgggtcaaatccttcttctgtcatgttgcagtggctctgaaacaggccccactctgaagcacatacagtaggtcaggtgtgttctattttttggaaaacagttggagacatttgggtctattgatttatgttgcactgacttttgttactgaggtcagattgtcttctagaaaatttggtcaaaccatagagtagttggtacaatgaaaactgtaggcatcttgtcccctgaaattcaagatcaattttgagtatttctaaatttggataatggagcatgtttctgcagatttagaagggcttcaaagttagttaatgaataacctgtgttaaggagtgttattttacttgtccttttgttttatagggatttgaaatgctaagtgtcctttaaattcatgtttaaaaatttctggatgattcttggatatagggagtacataacatcaatataaacatgtttacccttagaagaagaaattttagaatgaaactgttaggcaggaaatgtcttttttttctttccaatttgcattttgggttcgggggtacatgtgcaggtttgttacaggggtaaactgcatgtcatgggggcttggcttacagattatttcatcactcaggtaataagcgtaggacctgatacatagttttttgatctttaccctcctcccaccttccaccctcaagtagactccagtgtctatggttcccttctttgtgtccatgtgtactcaatgtttagctcctacttataataatgaaaacatgcagtatttggttttctgttcctgcattagtttgctaaggacaatggtttccagctgcatccatgttgctgcaaaggacatgatttcattcttttttatggctgcatagtattccatgatatgtgtcacattttctttattcagtccactgttgatgggcatttagattgattccatgtctttgctattgtgaatagtgctgtgatgaacatatgcatgcatgtgtctttgtggtagaatgatttatattcctttgggtacatatacagtaatgagattggtgggctgaatggtattctttgaggatctccaaactgctctccacattggctgaactgacttatactctaatcagcagaatcagcagtgtataagcattctcttttctctgcaacctcaccaacatctgttatttttcactttttaatactaaccattctgactggcatgagatgccatctcatttcggttttgatttgcaacatgattagccatgttgagcatttgttcatatgcttgttggccatgtgtatgtcttcttttgagaaatagctattcatgtcctttgcccatattttaacagggttgttttttgcttgtaaatttgtttaagtctcttatagattctgaatattagacctttgtcagatacatagtgtgcaaaaattttctcccattccattggttgtccgtttactgaggtgatagtttcttttgttatgtagaagctccttagtttaatgaggccccatttgtcaacttttgttttagttgtaattgcttttggggtctttgtcgtgaaatctttgccaggctctgtgtccaaaatggtacgtcctaggtttttgtctagggtttttatggttttaggttttaaattaaaatctttgatccatcttgagttgatttttgtatgtgatggaaggaaggggtctggtttcaatcttctgcatatgactagccagttatctcagcaccatttattgaacggggagtcctttccccattgcttgtttttgttgattttgtcaaagatctgatagttgtaggtgtgttatttctgggtcctctattctgttccattggtccatgtgtctgtttttgtaccactaccatgatgttttggttaactgtagtcatgtagtatagtttgaagctgggtaatgtgatgcctccagctttgttctttttgctttaaacttccttggctatttgggctctttttttggttccatatatattttgcaatagtttttttctaattctctgaagaatatcattggtgtttgatatgaatagcattgaatctgtagattgctttgggcattatggccattttaataatattgattcttcttatccatgagcatggaaagtttttccatttgtttgtgtcatcactgatttatttcagcagtggtttataattcttggtgtagagctctttcacctccctggttagctacatttctaggtattgtattttttgtatagctgatgtaaatgggattgcattcttgatttggctctcagcttgaatgttgttggtgtttgaaaatgctcctgattttcagccattgattttgtatcctgaaattttgctggagttgtttatctgctgaagtagcttttgggccaagactatggggttttctaggtataaaaccatattgtctgtgaaaagagatagtttgacttcctctcttcctatttggatgtcttttatttcttactgttgcctgattgctctggctaggacttccagtactatgttgaataggagtggtgagagagggcatccttatcttgttccagttctcaaagggaatggttccagcttttgcccattcagtatgatgttggctgtgggtttgtcatagatagctcttattattttaaggtatgctcctttgatacctagggatgttgaattttatcaaaagcctgttctgcatctatggcgatgatcatgtggtttttgtttttaattatgtttatgtggtgaatcacatttattgatttgcatatgttgcaccaaacttgcatctaagagatagagcctaatcatagtggattagctttttgatgagctgctggattcaatttgctagtattttattgaggatttttgcatctatgttcatcagggatattggcctgaaatttttttctttctttcttgcttgcttgcttgcttgcttgcttgcttgcttgctttctttctttctttctttctttctttctttctttctttctttctttctttctttcctttctttctttctttctttctcttttttttttttgttgtgtctctgctaggtttggtatcagaagaggagggactcttctctaattcactctttgaggccatctcatagaatggtaccagctcatctttagaaaatgtcttcatctgacctgatgggcacattaaatacagtatgtgaagattttcatggcagttttggccccactttctttcaggttgtagcagtctcttcttataacaaggatttagcagcataaggggaacctctcttcagtattcctatagacagaaccaacatatatgagctcacaatctaaaattgcaaaacacgtggagaaatagtttatcatgaatgagagcaagcaagacatttttggattataataatttgagaatgatggataacacttttaagatgatgtatttgatatatctaatctttcccttctttcttttgaaatgcttttttttttcaaaaacaaggaaacaaggaaattttcttttgaaagaattttgggcttacataaatatcgtaaaaaagtatagagagtccacatttacccatcacccaacttcccctaagttaaaaattatacaaccgtgataaaactatcgaaaccagaaaattaacattagtagaatattactaaaactacaaatactattcagtttcttcagttttttcctaatgactttttttctgtccaatattctatccagaatcccacatttcatttagttatcatatgtcttgaatttcgtctaaattctttagtctatctggacccttttgaaaagtattagttagttaccttgtagagatttctcagtttgggtttgtctcatgttttctcatgacagttttgaggctatgaagttttggcgagatcacagaggtgatgtgccttgtctagtgcatcatattggggtacaaacattggcatgtcctattactgaaagtgttaacatcgatcacttggctcatgtggtgtctgccaggtttctgtattgtgaagtggagccctggcaaattatcttgtggggaaatactttgagattatactaacattgtgtttttcctcaaacattttcttactgattttagcatttgtcagtagctctttgcctctaatcattatgactgtagagtttgcctaatgatgattttgtattatccttattgcttctattaatacatttattaactggagcttatctataaggaagagctatccttctcctttatttatttacatttgtaaaagttcatggatgtttattttattctatgtgttgtaagtcggtactattgttatttattttgttgctcagattattccagttttgaccactgggagcagcttcggtgtccatttggctcctgtcgtctttagacacatcctcatcaattttcaatcagtttttcattttctcacatcataaaatgttcctgaatcattttgcattttgcctgctcttgccctggaatcaactgcctctcaaaagatttctcattccttgtattggggaatggtgtttagaaatcaaaatctggatgcttggtgtgtgtgtagcaatttagatgtcgctgaatctaggcctccgcaatcagcatagttgggcatatgtgtttgtataccaacacccatatccacacatccatatctgtatctatatattaatttactcgtctatgtgtttaaaaccttcagatcatattgattccctgaattccaatccagcaccataagatttgcctcttgctctcactgtctacaatatatactcacttatttgttcaattcctagcatacacctaaagtagttacagaattgctaactcatatatttgtgagaaatagatttactaactcaactacagtatttgtgtagacttctttttgtctttagtcttacagtagcctgtcaaaatatggttttctgaaatttcttaaattaattcttttcttctccatagccttcagtatgtttatgttatttatttgtaatgcacttattggggctgggattgctgtgatttggatacttgtccctccaaatctcatgttgaaatctgatctctagtgttgaaggtggggcctcatggaaggtgtttgggtcatggggggtggatcctctaagaatggcttggtgccatcctcatggtaatgaatgagttctcactctattacttcgtgagagacctggttgttaaaagagcctggcacctcccccttctctcttgttttctccctcacttctgctcctgccatgtgatctctgcacaccagctttccactatgaggggaagcagccggaggtcctcgtcagatgcagatgctggtgccatgcttgttctacagcctgcagaactgtgagccaaataaacctcttttattttctcttttcttttttcttttcttcttgagacagggtctcattctattgtgcttgaagtgcagtggcacaatcactgcagcctcaacctttccaggctcaaggaatcctcctaactacagcctcccaagtagctgggactacaggcttataccaccacacctggctaatttttgtattttttgtagagacaggattttgccatgttgcccgcaggctgttcttttctttaaattacccagcctcaagtatttctttattgcatcataaatggactaagatgggatatttgaaccattaccatggttctaagaatcaaagccatacagaaatgtatatgaaaggaagtatcactctctcctcatgcttactatcctgttctcctttgctcatctttctaccttacctagatctttcctgtaagtagctgatgtacctgtcttgtatttcttttcttttcttttttttctttctttctttttttttagatggagtctcactctgttgcccaggctggagtgcagtggcatgatctcggctcactgcaacctctgcctcctgggttcaagcgattctcctgcctcagcctcctgagtagctgggactacagatgccctccaccatgcccagctaatttttgtatttttagtagatgcggggtttcactgcattggttaggctggtctcgaactcctgactttgtgatccacctgcctcggcctcccaaagtgctgggattacaggtgtgagccaccacacccagccgtatgttttttttttttaacataaataagcacatacaactgtttattttgtatccccttctttattacttgaagaataacatagtgtagataatctttcacattttgctttttataagcttaatgttatgtcttggaaatcactcctaatcagttcacagaaatcttcccaattcttttttataactatatagtaccccattttgtgaatgtgccatcgtttattcaaccttccttctacatagaggcatttaggttgtctccagtcttttgtgattacaaacaacactacggtgaatatttttgtattgttagaggtgtaccttcagggtatatttctagaagtcagatcacagagtcaaaggtaagtgcatgttttattcttcattgccagatttccctctgcaagagttgtgctgggttatactcccactggcattatgtgagtgtggccattttcctagtctgcctgacagaatgtcataatttttcattttgtcagttttatgaaaatagtatctcagtgctgttttcatttgcatttctttaatgataagtgaatttgaacttttttttttcatgtttgaaggccatttttgaatcctttttggttaattgtgcattcatgtcagtgtcctgtttttcgattgcgtctttgtttcacactgttcaagggttctttatttattagggatattagctctttgtggtatagactgcaattatttactcctagttagttgttttgtgactttttatagtgtgtctttgtttattttggtcatgtaattttaagacactttatgtagacagatttactagttatgtctctggattttcagttttatatagaaaggctaaatagaaaatcacccattacttctatgctatcttattttacatttaaatctctaatacatttgggtttttttcttgcatatagtgtgaaatatggaatctaattttattttatttttccaagtgactacctggttgtcccagtaccatttattaaactggacacttgtactccagtgatttgagatgtcaattttatcctacattagcttttcatatgtccttggtcctatttctgaacttcctattatattacatgtctatttgtctgttaatggaccagcatcaaattgtttgaggctttataatatgttttaatgtctggtagggctagttatgtcccctttttagtttttctttttcagtgctttttgggatattcttaatatttcttttttcttatgaacattagtatcaacttgtctaactcaattatgaaatagcttgctgacatttttgatcaagattgcattgaattcatacattaatgtggcaatagctgtcatctatatattgttaattaatttaatctgagaacaggatgtgtctttgtatttgatcaagtctacttctgtgtctttcaggaatgttttaaaattgtgttgtataatttttgcacattttttgttaaaggtattataaaatatttaatctttgttgatattatgcatgtggttttctttgacagtaagttctctactgtttatttttttgtgtatatagaggccattggtttttataagttaatttatccttagttgatatccctgtctaatgttaaatagtagcagaaataaagggtaaacacagcaggcctatgaatgccatgcttagaaaggtctacttgccaggttagtccttggctggcatctgggaactcaaatttcagaagtattcccaccattatctaactaataaggacagtttactgtgcctagactgtttatgcaaacaatttgatttatgctaaacacctgttttctttctgggagtctggaattttggtatatgttaggcagaggatgtttatgtgtcagaccccaataaaaacctgagtctctaatgggcttctctgggcaggaacatcacacacatgttgctacattttcattgctggggcactctgtgagcccccaccatgggaggaagagcgagaaggaagcctcacatggatctgtactcacgtggactccacattcgtcttttccccttatgatctggctgtgtgtccttacttcatggctgtaatgaatggtagtcaggtgtgcaactgcatgctgactcgcagaattcctctagaaaatctccaagtgtcaggatggtcttggagattctgacacactgacatagtggaaatgcctttagtatttctctattaaatatgatactggctttaggattagatatatatacctaatgtaattttttatcacattaacaaagtatccaccaattcctactttcttgagtgttttaagcaagaatgggtgttgaaatttgacaaagattttttccccctagtatttatggagatcatcatattatttttcacttagatctattaatagagtgtatggtactaatgaatttcctaatattgaaccaaccttgaattctggaatgaattatcttttttatgatttattattttcttaatgtggtggtctttttgctaatatttcattttctatttggcattgatatttattagtaattcatgatattcataagtaatacttttctgtagtactctttttttttcttaatgagtctttacgtggtttaggtatcattgtcacacttgcttcataaagggagttaggaaaatttaccttcttttcaataatctgaaataatttatagataattgtgactatctggtttttgagggcttgatacaattcccctgtgagaccatcttggcctggctcttttttgggagtgggctagttatttcttcaataactttttatttctttggaaataggtctgtttaagctttctaaatcagatggggtcaatattggcaatctgtatttctctagggaactatccatttcacctagggtttaaaatttattttcacagaagtttccaaattagtcatttatgatttaaattttacttctgtttcaatgattatttccttgttgttctttcttattttgaatatttgtgctttttcccccttttccccttaatcaagttagattgtggtttgtccatcttgttaatttttttcaaaacaacaactgggagttggttaattaatatactgtttttatattctccatgtcattaatttctgctttaacttcattatctccctcctttatttggtggactttgtttttttctagtttttagaattggatatttaatctttttttcagtgttgttattaaatgtgttttgtgcaatgattttcctctgattactgctttaaatgcatcccttaaattttgatatgtagtgttttcatcattttttaaaaattgtaatttctgtttctatttcccacaagaattgtttcaatagaacatttttaactttcctggcagaaggacctttctgttttttgtttttcttagtaattttctagcttggttgcactggcagcaaagaggtttttgtatttcaaaatatttctactttacggaagttattaattgctatgttttggatatttgtccccttcaaaccttatgttgaaatttgatcgcagtgttggaggtggggcctgatgggaggtgtttgggtcatggtggcggatcccttctgaatggcatggtgccatctttgtggtaatgagttctcactctattagtccttgtgagagctggttgttaaaagagcctggcgcctcccactctcttgcttcctcttttgccatgtgatctcagcatgccctgggtcccctttaccttccccaacaagtgggagcagcctgaggccctcaccagaagctgagtggatgttggtgtctgcctctactttcagaggctacagaaccatgagccaaataaactgttctttgtaagttggctggattggaatcctttgttacacttttttttttcattgacttatttttaaaaatattgctccattgtcgttttgtttatatcttgattttggaagacctgatgtcagtctgattgttttgcgtgcggccttgatgatttttatcttcttccttgaaatcttatagttttactagaacatgtaacagagattttagttttaaatattagcttcattctactatttgtttttttcccttaaggactccaataaacaaatattattccttcattgcccgggttccatttccactactatctctgcccttttaatttatctatttacttattcatttttattctcttacttgctttgatatctttatttagtgacccttgttatattttcatttttgtctattgtcttttgggcatcttttaatttatttctcatttcttttgtaaagtgatttctctgagtacataatagttgttgcatatttatgggggacatgtgatattttgatacaataatacaatatgtaatgatgaaatcagggtaattaggatatccataacctcaaacatttnttgttacttgttttgggaacattccaagtcctttcttccagttattttaaaatatacaataagttattgttaattatagtggccctatcatgctatcaaacactagaacttattacttctaactaaccctattttttgtacccattaaacaaccccttatttctgagaaaacttggttacctcatccttgagttcaatcaactttttatttctccctgttatttgcccatttctgttttcaaatctctgatttaaggtgggtttgtatttttgatgcttgcttgaggcgtgggcatggcgaattcattttgaagtgtgggcttgtagttttcttctacatgcttcatggttattttcagaggggattttcctcagctgatacatgtgacatttccgctcctgatagcgtttgcactagctctgtaggtgtgacttcatttttctcttgttcatttaatgccgttgggcttgtttgtgttttgtaggattcctggcgctcttctgcgggcagagcacagtcctccgactcctgccttgcggaaccccgcttttacctccttttcttttccacttgaccacttggttgcccaaaggagctttcccttcctctttgctctttcctccccaaggctgcatgcccccagatgggccctttctgtgctcctgctcctctcacagcacctcccagggcccagttccccctggcccgttctggtggaccttctgatcacctcagcaccccctctgtcttccctcagggctttctgtccatttgctgtaaagctttgttgctgggacagcagtgagagagagagcaggctgggggtttggtggtattttcacttttctcttttcagttcagatattttacacttttggggttctctaccttcacattatgtggaaggcatggctttgtgtagattttactttcttttctttctttttctgtcttttgggaggaaattttgggatagaagcagttataccactgccattgtcctcagctgtccacattgccaattttttttttttttttttgaggtggagtctcattctgttgcccaggctggagtgcagtggcgcgatcttggctcattgcaacctctgcctcctgggttcaagcaattctcctgcctcagcctcccgagtagttgggattacaggcacccaccaccacgcccggctaatttttgtatttttagtagagacgaggttttgccatgttggccagtctggtctcgaactcctgacctcaggtgatccgcctgccttggcctcccaaagtgctgggattacaggcatgaaccaccatgcccagccccgtgttgccgatttctaaaagggaaccactgtatgttaatcaacaaactgtgctgtggtggccacaggccaggtccatggagatttcagaggcctacccaggcaagcttgaggaggtggggggtgctgggaatatgaggagttgttgcctagggttcctggccttgtccttgtactttgcaacttggtgttccccagtttgtgctggagtatccccaggagttggggaggatagactgttggcagtagaaggaactttatacacttaaccaagccccatgatcagtgaggggctgagctgctgctccatgtgtcagctcgtgtctccagcccagccactgagctggcccaggtaggactgagctccctcttcttctctggggctgccattctcagccacccccgcacctccctagtagagttccctgaaattgccctgtgtctgggccaaggatacaccccgcactgtagtgtgcagttcttccgtcctccaaagctcatctgcgcatctcttctggttctcttaggccccagcatggtcgggagtctttctctgtcccccagcgctcccagccaacagcactgctcacttctgccccgtccacctgaatctgctgcagtgggccctgctctggtcctcctggggctgggtcgggtggattttggagcgagcgagggagctgaacaatgcactgtgggctggcttcccttgttgctgctccggcaggacggtatctccacaaaggttcagaggcgaaaggaaatgagaacgggagctatgacttggattcacagggaagctgaataaagggaaaggagagagtttaaacttatctgcaggcatcatgttaaatgtaatgttttcttgacaaatagccagcacactgcactatttttaaaaatcccctcattaaaagctaagaccaatttcttacatatggaagagtttctatgctacaggttattctaatgagaaaagaagaaaagtgacttacaatactatacaataccatcacatgaaatattcatgtaaaaattcttttagaacaagaagacacattcttataggtaagaaatgctatgcagatattaaaaattaattcctgagcacaagagtgagccagggtaatgcgagtgcagtttgtccagagtttaaaaaccaggacctggggttcccaggccttgaagccatcactaaggacctaagcctcgctctccactcccgctaggccgcagggacccgctcctgggggatggagggcaggaagcagggggcgaggggagttccaagctcctgggggaagcccgggactttccagggttttcttctcagtaatagaaagtgcctccggggcaacagagcaagactccatctcaacaaaacaacaacaaaaacaaaacaaaaagaaagtgcctcctagagagtaggtgggagttggaagttccttcagtcttcatttccatctcccaagcgacactttctgaggcagggtcccctgcacaggcgtcctggagcgggaggggtggctggcggtgccaggagaggagggcagctgtgggcccgcggaagcaccgccgtggcgggcttggggtttcggagcacaagataacagctgtgtgagaaacacacacagctgggtgaggacagaccgtcgggacttacgcgaaagcctgctttgagggttcacggcgccggcgacacaaaggtggagtttactgcagcctgtctccagcctcacagcagcccaggggagagggggcgcaggagcgctgggacccccgcagatctcggggcttctctcagggtcacagagggctcctctccttccccttggcctccttccttgcggggtgactgcccctcgtggcctccctgacccgggtgccctgtgggtgctcccgaggggatcgaggtcggggtggaggatgtgagctctgcaggccgcccagccagcgcccacgtgctcaggtgtcagctagggacgcgcgtgtgcgtcagcgtgatttggaggaacgcactgtgcctggaacactctgactctgtccctctgcgcctgcccgcctccccaaaggccaggtcggctgcacgtagtgtttccgcgtatggtgcatctccctgtggccatcccgcccccagcctgcagaggaagagttcccaaagcctttcctaaatctccaaagtccctctgtttccctggtggcacttcacactagctctttgtgtgaggtgggactcgccagagatggacagtcactgccaggagaggcccctgcgtgtcctgggaacctgggattcagtgcgtgctcagagacgttttaggagtgcaagatttaccataggcttggcgatgtcttttgtttatttttaagttaactgaaacaacccaggaactggatttcttcaaatttaccaatttatactttaatttgggaaaaggaaaagcactcaaaaataaatttaattagtcaatctataattatgatacgaataagttccacttaaatataatattccaagcataataatttgttgagtaaatcaaatcgttgatacatcttagtgttcccaaagttaggaaatcatctaagcttcataaaaagaaagcatttcacgtatttaaattttccccagaagtccttctttgctaaaaatagaaaaaaacaacaacaacaacaacttttttttcatgacttcaaaatttgcagatattctgtgcctggaaggaatcagtggggtttctcatgctttccacaccgtagttcaggactgcagcctggaaactgcatgatgatggaatttccatcagagggaatattagacattatttaatcaaatcctttcattttatgaatacatttcagaggtcagatgagttgagtgctctccccctccgccccctgccaggacccttctggtcacagtggctctgggtgggcaaccctgttctctcagaaacccctggctccttgggcacaactcgctgaagtcttgtgtccccagcctcacatggctgccctggatactccaggtgagcagggccctattgggttgaacagttgtgacctgctacgtctggggacttaggtctggggacttacatgtgcatgtatttctgtatcatcatttaaaaatctgtgcaatgttacattgtaagtggataggctatcatcagcttttccccttttgttgacatttaggttattgtctatctttttcctcttgaaacagtcatgtaaggaacatctttgagcattgggtggtgactattttccaccctccttgcgaggtagggtctttctcaggaaagaaagagattatgtgctcaaaggtcaggtttggggaaagaatgggtgtgctgaactcctgaagaaaagaggccacgacctcatgggcctgaggggcaaaggggagatgggagctctagtggcctgtgatcacctgtggcctggccagaggagccaggagattcagtgaccttgttcctcccacccatcaagtcctgccagtgtctcccattggccagacttacctggattccagaagatgggagagctgccagcagcagggctggggagaaggctggggagaagaccaggggcaggactaaagggcaatgagggatagccccagacagtcctccacttgtgcctgttaggattttaaaaacatcgtttgtccagtccaagagaaaatcacttgtcctcaaaacaagagctgtacaatatcccatcagctactgtgtgatatggggtgatgttggttcagtaacacctgaaacttaaaatgttagctatcccaatgctcttcctattatgacaatggagaataagtgggggaagagaagcaacaaaataccataaaacagagctgctatagccccggcttccagagctgattctgaagtctgaattgttagttaactcacttctttaatgccacgttcccctgacctctgccaccacttcagatacgtggtttttatccactgttgaggtgacccaaaccatcattctcataggacctgagaccttggtgttgtgtctgtactcgagtgccaaggtgtgcatgaactgggactactggaatgtaaggaggcacacctgtgaatgcccagctcccggccagttcttgccagcatgaggaagcagcaacctagttccctctgagaattgaaagcagttatcttggacagtagagggactctccttgtctgcttgatggtcacaagacatgtggagcttcacatggccagggaggattctcagcttccaatgaaatgctgacacctgttgtgataccttggttcttgtcttcttggtttaagagaatttaaacaagagacacatagcaaaagaagtgcagcatagagtattgcaaaagaaaaagaatactttgaaagttaggtgcagaataggcagtacaccctgagagagagagaaattcaggacgggccgctcataaggatgagacaacaaagaccagcactagggaggctcccagtatgggagtcttacatgattatttataaggaggtgggagaggtgttgctagtaagaatgttctgggtgttcctctgggtgcatgtgcgcagtagctgtacatgcttgttcatatatcatatgtctcattagcatcttaaatctccacccaggggtatgttttttgctattataatgagggcaggtaaagtcaaattgcacatgctctctagaggggaaagtccctactgaagatagctttgcttgaatagctcaattacaatgcaaatgctgaggcttattttgttgactgcacggtcaccatggttgccgcatcctgagaacatagtcactgccttgactgcctatcccacctcaggtaataaaggtaatggtacctttattagttgtgtttccttggatattaggacccgcaaatccactgagctcaagataattaagacagggggcaaaaattgctgaagtgggtcactgggtatagtaataagggagggagtgctcctatctcactcctttgtttcccacaccagtgcttcccagtgggctgtgacagagatagtgacattcattggtaatttgtttaagcacatactgcatgctgtagggtggcaccccaactttgctgacttttggattgcagcaaatagtacctctgaagctttagcaggccactgttctatcaagtcagctgcttctgggtaatggagcacatggtacgaccagtgagttctggtgtgatgcactgccttcgctgtagaataacctccttgtcaaaggaactgagtgagaaaccaaggactggaaaaggaattctgtacatcagtgaatgatggggctggttgaagctttacaagaaagaaaaggaaatccttatttgtaaaatgtttctaacatttctaacctaatcataggatttctaacctaatcataaatttctaaaataatcataagagcccttgtgattggattgcgcccacctctattggttagaataatttccccttctccgggtcctcaacttaatcacatcagcaaagtccctattatcatgtgtgttcatctcctattgctgcacaaattaacagaaattgagtggcttaacccgaatttattcttttacatttttggaggtcagaaatctaaactcagtctattagagagggctgtgctacttctggaagcttcagaagaaaataatatggtttttcttctttagccttttgatatggttagattacattgattaattttcaaatattgagccaaccatgcatacctgaaataaatcccctgtggtcatggtgtataattattttcacgtattcatggattcagtttgctaacattttgttggggatttttaactttatgagatatattgatctatagtttcctttatgctagctttgtctgattttggcttcacaaaatgagttggaaagtgttccttcctgttttatcttctggaaaagattatatagaattgatgctagttctttacatgttcagtagaatttttattttgttgtttaagatttgctaggataattttattaagagattaatatgtatttttagcaaggtaaaaaatacaaataataataacaacccttctgttcataaatatcccttcaggtgaaaacactggaagtcacaacaatgtaaagaatggggcccaaataaagcccaagtattttttgcacacttttatttattttacctaccatatgatccataattcaaccttttattcagttactggctttattagtctgttctcacgctgctgataaagacatacctgagacagggaagaaagagatttaatggacttacagttctttgtgtctggggaggcctcacaatcatggcaaaagacgaggagaagcaagtcacattttacatggatagcagcaggcaaagagagagcttgtgcaggaaaactcctgtttttacaaccatcagatattctgaaattcattcactatcacgagaacagtgcaggagagtcccatccccataatttaatcacctcccactgtgttcctcccatgacttgtgggaattgtgggagttacaattcaagatgagatttgggtggggacacagccaaaccatatcatttcaccctggcccctcccaaatctaatgtctttacattgcaaaaccaatcatgccttcaacagttccccaaagtcttaactaatttcagcattaactcgaaagtacacagtccaatgtctcatctgagacaaggcaagtcccttccgcctatgagcctgcaaaatcaaaagcaagttagttacttcctagatataatgggggtacaagcatttggtaaatacagccattccaaatgggagaaatgggccaaaaccaaggggctacaggccccatgcaagtccaaaatccagcaggatttcttaaagctccaaaatgacctcctttgacaccatgtcccacatccgggtcatgctgatgcaagaggtgggttcccatggtcttgggcagctcggtccctgtggctctgcagggtacagcctccgtccccgctgccttcacgggctggttgagtgttgagtgtctgcggattttccaggcgcacggtgcaagctgtcagtggatctaccattctgggatctgggagcttctcacagctccactaggtggtgccccagtagggactcctcagtgtggcacctctgaccccacatttttctgctgcactgtcctagcagaggttcttcatgaaggccccgcccctgcagcaaacttctcctggacatccaggtgttcccatacattctttgaaatctaggtggagggttccaaacctcaattcttgacttccatgcacctgcaggctcaacagcacgtgaaagctgccaaggcttggggcttccactgtctgaagcaacagcccgagctctgccttggctccttttagccatggctggactggttggaatgcagggcaccaagtccctgggctgcacagagcagggaggtgctgggcccgacccaggaaactatataaccatgactggactggctggaatgcagggcaccaagtccctgggctacacagggcagggaggcactgggcccgacccaggaaactatatttttcttttaggcctctgggcctgtgatgggatgggctgccaagaagatttctttttttttttttttgagacggagtcttgctctgtcgcccaggctagggtgtagtggcaccgtctcgtctcactgcaagctccccctcccaggttcactgcattctcctgtctcagcctcccgagtagctaggactacaggcacccaccaccacacccggctaattttttgtatttttagtagagacagggtttcactgtgttagccaggatgatctggatctcctgacctcgtaatccgcccacctcggccccccagagtgctgggattataggcgtgagccactgcgcctggcctgccaagaagatttctgacatgccctggagacattttccccattgtcttgggaattaacattcggcttctcattacttatgcaaatttctgcagctggcttaaatttctcctcaaaaaatgagattttctattctattgcattgtcaggctgcaaattttccaaacttttatgctctgttttctttttaaagctgaatacctttaacagaacccaagtcacctcttgaatgctttgctgcttataaagttcattttttttttttttttttgctgtcaataagtttatgatcttcatctgaaaaatcctcatggaaaattgtttggtttagctctcagaagcccacttctgagctctgaggaagcttgcattcttttgagctactcaatctttcttttgagcaagggacattttgggacagttccacttctttttaacttttttcttgggcttcttctcctagatgggattctctcatatagcagcatgagctttcttttacatctcctccatcatgtctggagttacactgttcttcctgtattgaacgaactgtttctggtaagcatcttcatcttcctccattaagtagcacatgtaatctgcaacattctggcccatgatgtgcttccggtgtacttctgcattaaattccttgctttcagaaccataaccagggaatcatttggtactgtgagggatagacaagcctctatctacagctctcttcagggcaccaaaaacttcattgccactggtagttctggcaaggcctgcatccatatagcaggtaaaggcacttggctgaccatcaatgctttccacattgtattccttgccagtcacctccacttggccttcatagatcttttccatgccaaacctattgagaagcctgcaggccagtacaatacaccgcagcgtaattggtcaggccaaccttcaaaccatattttcgtagttcacatgcatatgctgtgcgtactatcatatccccttctgtacgggcataagcaacctgataaataatatctctgtgtgttacacaaactatcatcctgtatttgggtgtgttgtatttatttttgtcctgtatcaccaagcatttccaagcataatactcagtttcaccctcttgccgtcttctaaatttcgcttgatatctcttaaagtaggctttattcttaacaactttacaaaccccatcctgcggaacagagatccccatccatggatcaacagagacctgccctgcttagaaatttcttcctccagataccctaagtcatctctctcaagttcaaagttccacaaatctctagggaaggggcaaaatgccaccagtctctttgctaaaacataagaagagtcacctttgctccagttcccagcaagttcctcaggtccgtctgggaccacctcagcctggactttattgtccatatcgctatcagcattttggtcaaagccattcaacaagtctgtaggaagtcccacacttccccacattcttctgtattctgagccctccaaactgttccaacctctgcctgtcacccggttccaaagttgcttccacattttcggctatcttttcagcaatgccccattctgctggtaccaatttactgtattagtctgttctcacactgctaataaagacacaccagagactaggttctgggcccagtgatatgtcacaatcaccctttgtggcaggtttcagtcaaaaaaggagagtcacaacagctgggtgatggatacacagacaggtccttatgcttcctataggcaggacccaggaaggagagttacattgcctacagaagacccaggaatttattcctttctctaagtctagctacaaatgccagcatctcttctgttggctggtttgtggtatgagtgtcatcatcacaactctgagctgggctaaagtatatgtcacaatccaaccttaaatatgcaaggtccaggcaaaaggtgagagttacatcatctaggtgctgagtgcagtgatgcatcacaatccttttgtggtagggtgcaggctgaagaagagtcacatgacttttgggttgggaccaggcagaaaagtcaagtcattcaggttccagacagaggtgtacgtcacaatcacacatcatttggatgaaaggcccagccatatgtcacaatgccacctgtgggcagcaccaaggctggaaaagagagtcacatcttcaaggtgcagagtcaatatgtcacaatctcatctgtgggctgggctgaagcaggagagtcaaatcactaagatgcttagcagatatatacaatcacacctggctgtatggctactgtctcctcactcttttctttccttcgaaaaggtcaccaggtttagcttagagacatcaagacccagagatcaggtttctgtccttcttttaaagcacatctctatacgaattctgctaagcaggttccagtatttccactcgtccagagagaattctatggccacattcctgaatgtaaacagtttcatttcccagctttcaggatgtcctggcatcttagctatgcgtctcccagtacctgcagatcacagggcaacagaggctgtgacaaagtcactgggggctccagaggtggtggacatggaacagtagagataaatcccaagctctggtgggagtgggagacaaaggcctggtagaattttctagtgaaacagtattggggaacctgcccccaatatttcaacgtaggttctttctattatccataagtgtcagccagctgagaaatagagacagtacaaagagaggaattttacaggtgggctgctgggggtgacatcacatattggtaggactgtgatgcctgcctgagtctcagaccagcaagcttttattaagggtttcaaaaggggagggggtgtaagaacagagagtaagtacaaagatcacatgcatcaaagagcaaaaagcagaaccactaataagggtctaacaaagatcacatgcttctgagggaacagaacaaagggcaaaagcagaaccactgataagggtccaacaaagatcataaagcaaagggcaaaagcagaaccactgataagggtctatgttcagcggtgcacgtattgtcttgataaacatcttaaacaacagaaaacagggttcgagagcagagaactggtctgactacaaatttaccagggtggagtttttccccaccctagtaagtccgagggttctgcaagagaccagggcatatctcagtccttatctcaactgcataatacagacattcccagagtggccgtttatagacctccccccaggaatgcattcctttcccagggtattaatattaatattccttgctaggaaaagaatttagtgatatatttcctacttgcacgtccatttattggctctctgcaagaagaaaaatatggctctttttgcctgaccccacaggcagtcagaccttaaggttgtcttcccttgttccataaaaatcgctgttattctgtactttttcagggtgccctgatttcatattgttcaaacacacgtgttttacaatcaatttgtacagttaacacaattatcacagtggtcctgaggtgacgtacatcctcagcttatgaagataacaggattaagagattaaagtaaagacaggcataagaaattataaaagtattattcaggaactgataaatgtccatattaatatgaaatcttcacaatttatgttcctctgccacggctccagccggtccctccatttggggtccctgacttcctgcaataaaaccaggagtctggaatctttttttaaaaggaaactttcaaattaataattcaacgtctttcatggctaaagggctattcagattatagattttatctgtgttttcatactttgtgttttttgaggaattggtttgtttctttttagttgccaaatttgtgagcgtaaagttgttgataatattcctttattatcattttaatgtctgaaatatatgtagtaaaatttcctatttcattcctgatattggtgatttgtgtctctctcctttaatttttggtcagtctttttagaagtttgtcaatttaactgattttacccaaagaaacagccttttctcctttgattttcattagtattgtcctatattaactcaatagatttcttctgtgatctttattgtttctttccttaagctttcttttgatgcattttactcttttttggcaagtgtttttgaggtaggaacttagattgttgatatgagatttcctttcttttccaatgttaacatttagtgttataaagttttgtcacagttatatttcggttgcaccctatatgtttctatgtgttgcattttcattaaaattcagttctatatattttaaaatttactttgagacctcttcattgacccatagactatttagaagtatgttggttaatttccatgcatttagagatttttctattgtctttctgttagtttctaactttattccattatagttgaagaacatactctgtatgagtttatttttttacatttgcggaattttttttgtgacccagaatatgatacatcttggtaaatctttcatgggaacttgaaaaaaactgtattctcctgttttggagtgaagtgttttatatatgtgtattaaatccctttggttcagtgttgttcagttcttccatattttgaattattttctgtgtagcatttctattagtttctgagggtgagttatttatgttcccaattataaacatgaatttgttttttctttcagctctagcagtttttcacttcatgtattttgctgctctgttgtttggtgcatacatatttaggattgttgtatcttcctggtggattgacctatttatcattatttaataattttctgtccctctagtaattttctttattttgaagtctacttagctggtattaatatagtctcttgcttagattttttttgtgtgtaacatatctttttccagcatatagttgggttattttttcaatcctttcttccggtctctgtgttttggttgatatgtttagaaaatttacatttaaggtaattattgatatgttaatgcttaaatatgccatttcaattaaagttgctctttcatatccatagcttttgcatccatgggttcaaccaactacaggtaaaaaaaattcccataaacttccaaaaagcaaaacttgaattttctgtgcactgactactatgttgaatccatgcaagtgatgagatgcataggcattgtattaggtactataagtaatctagggatcatttaaagtatacagaagaatgtgcttagtttatatgcaaatactatgcccctttaaataagggacctgaacatctatggagtttggtatccacagaggtcctggaaccaattccccatggatactgaaggattactgtatttattttctctttatttcctctgtttccagtacatacccatgtttcttttgtcttgattttctgtgtgttacttgaacattttttacagttctattttgattcatttatagtattttttagtgtttctctttgtatagttttggagtggttgctcagaggactacagtatacatacatgacttattagaattaccactttgagtgaagtgtgacaataccacttccattaagattcctttatcttttcttgagtatcagatggcaacataacttttgtttaaatcatcaaatcgatctatacaactcatagggaaaggaataatctattgtgtgtacacatttctgctttttcagttccttttgcttcctgatgctccaaaatttgtctttttttttttttgagatggagtctcactctgtctccaggctggagtgcagtggtgcaatcttggctcactgccacctctgcctcccaggttcaagtgattttcctgcctcagcttccaaatagctgggactacaggtgcacaccaccatgctcagctaatttttgtatttttagtagagacagggtttcaccatgttggccaggatggtcttgatctcttgacctcgtgatccacctgcctcggcctcccaaagtgctgggattacaggtgtgggccaccacacccagcctgtcttattttttgtaattttctttatctttgaagaacttcttttagccaatctttaagggtaggtctgctagtaaaaaattctttttctttatctgagagtgtatttatttcctctttattcctcaaggatagtttcactggatatagaatgtatggttgacagtgcttttcttcagtacttgaaaaatgttgtaccatttccttccctctctcctggtgtcagagaagaaatttgctgccatttgaatttgtgttttcctgtaggtaacgcatagtactttctggctgcattcaaggtttttctttgtctttagtctttgaaagttgatgatttattttgatatggatttctttgggttcatcgtgttatcctgttcctagggtttgttcatcttcttgaatttgtaggtttgtgtcttttgccaaattgggaaaatttcagcctttattccttactgtacttttctaaccttgctctaattcttttatccttctagtactccagtgacatgaatattagattttaaaaatagttctacagttccctgaggctccattccacctctgcccttttaaaaaaatatattttctccttgctgtttagattgggtgaattctattgatttgccctcaaattcactgattcttttctttattatctctactattgagtgcatatcaagaagctttaagaaattctgttattgggcttgctcttccactgcgtgaggatgtagcactcatcagaccccaaatgctggtacctggatcttggacttccagccttcagaactgtgctatcttctctcttctaccttggaggaaactgaagctccagagatctgggtatctttccaaggctttgactctgggaggtgatgagtcagggttggctctaaagcccaagctcttttcttcacaccttgatgctgtccagcctgtccatggaccagttagagccagtgaccaaacaggtacatcaaaatggcatccctcctggatggcacatcctccccagacagcctgcccattccctggctctgacaggctagcaaatccctgataacctcggaatgcctcaaattatgtcaatgaagggcagtgaggctttgatgttgaacaaatgccccatgacggatgggcactggctgatacactttcccacggtgactcagaagtgtgaaggagaaaggagggctgaggtgccagctccaggcaggccaggtaccccagatgtcagcacctgcccggctgcctctgacatacccttagacataccttttggcatgtggagccccaggggcctttcttcatgtccagacaggatgactcatcttaaggggtgtggcaggaactgagcatgtgtaccaccacctgagctgcagttcttgtttctgtaagagaaaatgctcccacattatcctactacatgtgctagacctcaaaggtgagagagagcatgagttgagggatctgaaatgaaagcagttgtagtgaaaagcccatgaaatatagcgctcaagggtagctaagtcttgcaggctgtaatttatgctgtttcctgctttgagaatgtatcccaaccttttggttactagaaagcctcaatttgaatagtaaaatacctgaattctgggtcctctaacttctcttcatgtgtggctcagtctaacctgtagtttaatactcagacatgacgccttctaggaagccttccttgatgtctccaattctacattaattcctccactatgagcttccacagtaacctaatcttaccctgagatgtctatatcaaactgcttcctcacatgagggaaggcaccaggtctcgtttacatttttgctctgtatcactacaatacaagagagaatgtgataaaggttgtaacagacccggaaaaaccactctgggagctctaagaagggtagttcatgtaaatacacacacatatacatatagttcatgtaaatatatatatgtatacacacacacacggccttcttcaaggaagagattgctcttaggatgttttcagattgaagatgctgtaaaatttgtattgatgatataaaattaaaaaaaagaaattctgttattgtatattttagatctatcatttccatttggttcttttttctntatcttttgtttcttcccatagtttttcatttttcacttgttccaagagaagttgttaactgattgttgagacatttttaggaaggctgctttaaaatccttttaagataatccagcatccgatatatctcagtgttggcatcaggtgtttgtcctttcccattcaagttgtgattttctcagtttctgatatgacaggtgacttttgattgtatcctggatattttgtctattattttaggagactctgagtcataaataactgttttatttcagcaggcagtcaacctgtttaagtttagcacacaggttatagactatttacatagcctgttgttcaaatgaagatttaattttcagagatcttgcagtgctactttgatctgtttggtttctccagtgctgctgggtgctgccttgggggctggaagggatatccccaggctgggctgcccagatgtctcttcctgtggagaggagtttcaggtctgcagaagtgaagaggcttccatggctaagtgtttgttaagatggcatcccccttcctgtgggggcctcagaacatttcatgagccatgtgctattgatgagcacatggctcttgacctgggtgtctcttggcctgagatcccaggtgtgaggtgtagtggggtccctcctcaggttctgtccactcaccacatatctctttgtaggggatggggtgccccccatggttacctttgctggcagagcttttattaatcttacttgacagggggacatgttcccctggtattgtttcatccaagggaggaacaagcccacctagctgtcttctcttgctatgttgggagttggtctggaaatgctgattttgagggacaaaatgcaccctgcagctgtgctgttcccattttcccgggctcctgtattagtccattttcatgctgctgataaagacataccctagactgggcaatttacaaaaaaaaaaaaaaaaagaggtttagtggacttacaggtctcccagtagaataccatagcacatggctcttgacctgggtgtctcttggcctgagatcccaggtgtgaggtgtagtggggtccctcctcaggttctgtccagtcactggtatctctttgtaggggatggggtgccccccatggttacctttgctggcagggcttttattaatcttacttgccaggggggcatgttcccctgatatattttcatccaagggaggaacaagcccacctagctgtcttctcttgctatattgggagttggtctggaaatgctgattttgagggatgaaatactccctgcagctgtgctgttcccattttcctgggctcctgtattagtccattttcatgctgctaataaagacataccccagactgggcaatttacaaaggaaagaggtttaatggacttacaggtcaacatggctggggaggcctcacgatcatggcagaaggcaaggaagagcaagtcacatcttacatggatggcggcaggcagagagagagatcttgtgcagggaaactcccgttttaaaaccatcaggtctcgtgagacttattcactgtcatgagaacagctgggaaagagcagccccccatgattcaattatctcccaccaggtccctcccacaacacatgagaattatgggagctaccagatgagatttgggtggggacacagaggcaaaccatatcagatcccaaacagtttcctctcctcttaccacctttccgaattctcctttagttgcctcttgctttattcccagggtttataggtgtgcttggcaggagtaagcagggagtttggggtctatatcattttgtctggactggaagttccttggaattgcccatttgtttatttttaatctctgtcattttgtttttaatttgtttctagtagagaacatataattggacctaactttaaaatatttgctgttatgccttatattcgctatattgtatttccttgatacttcctcttcccatgtgctgatgttgtatattgttaaagtttctttgcatcttgtttttcagtgttttgaagttataaataatagttgcattctcttaatttttggcttaaaaatatactaaatcatatttaaacctgccattataaatagtaggaataaaacaagagttgccatgcattttagggttctgctagagattaaggaactttattggcttctcagcggccgtttggtttgagaaccttgaatgagacactgcttcctctttttccttgtgatgttgaaaagttagacctgaagggctgcttggatcttttggtgcttttgatagcagcatgttgtccttctttcacttggaataaaatccagagcctcaaccatgacttacaaagccacaaatgacctggctgcagctgccatttacatataatttcctgcctcagggggctggaccccagacacggtggccttcttgctaggtgaatgtgcatttgtacttgtcacctctacgtgggatgctcttcccaagcatgctggtggtggttcacctctctagagtctcctcaaatatccatcctcagggcagccttccctggccctgcggaaggagttcttccatcattgctgactactttcctgtgttccttttcttccaacagattattacctatgacacattgtaataatgctctaatatatatctgtggcaaatatatgaatatataaactttttctctgtctcccttcaccagaatataagctccaggagatcagcaaatgtgtgtctatcttggtcactgtggcatcctgggtggtcctgacagtgctgccacatagtaagcacatcaaacaaataaaggagtgaatggagactaagcaatatgggatgctggctcatgaggactgcacgtttttgaaatacgtgtacttatatttagaaatcaaaccatatatcaagtggtgtaatagtcattcatcataattttcacaggttctgtgaggagagtggttctcacatggattcacctaagaaggcttcttgtgaggatatttaatcagatttcttaagctgagaagaaagagaaaaagataactttgttatttctcagcagtgttaggaagctttggggatttcttggttcctaagtgatgaattctccatgcaggcctgttcatgcctgtgtgttcatttcctcctttgggtgtgaagggggtttggaaagccttcccatgggtctggatttatttgtgtctctgccagtgggacatctttagccatgccaagactctgtcattgaaagtaagaatagtgctgataataggcaggataaaggctctaatttataggttgcatataataatttcatgttaatagttgataactcttgccaaatcctaaatcaggcttccctgctgccttccaagttcttcctggctaactgtcatttctggtgtatgttatttttcaatattagttacctttcctcataaactatagggcttataacataagtcatgtagcttttatattcttaactgtcttgagaaatgttaagatctgagaaatgacataatgtaaaagagtgaaagaaagttcattcactgtaaagcttcatcataggaatgctggtgaagggcacggttgtcctcatgtgctctaccccacagaggcagagtggccaccgatctgtgcagtctctaagttcaccgacacaataactcattcttcttgcctttggggaaataaacagcagaaagagaaaatactcccttagcagtaaaactaaacaaatgagaacacagaaatgaaactaaacaaaaaaatacgtatcactatcaaaatccccccaaaataaattttattttcttccctttatttagtgcttttcaataatgattcaagtcacttctaatatctctttttcatggaatacaaaaataggattagtttttaaattacagatgattttaaatggatctctgattccaatgtgaatgaacaacataacaagaagtttatttttagaacgagagtggtcacctagcttttctgccaggcatataaacatgagggtcatttaacttactttatcttgtatctgagtctttaaggaagtgctgccttgcaaacagaatcattagtaagtttactgggaagatgcatgcataattttggaggaaaattgacatacaggcattttcatttttatttttacttatttatttattttgaaacagggtctcaccctgtcactgaggctggagtgcagtggtgcgatttcggttcactgcaacctctactccccgggcccaagtagtcatcccacctcagcctctggagctgggactacaggcttgcgccaccatgtctggttaattttattttttgtagagacaggtttcgccacattgaccaggctggtcttgaactcctgagctcaagtgatctgcccaccttggcttcccaaagtgctgggattacaagtgtgagtcaccacgcctggcacatttttatttttaaatgtttgcagtaacgatgatttataatgagtttttactaattttgatagtctttctaaccttgctctgacattctccaaagataataagtcaagttcatttaaaataattcaattataatatatttgaaatgcttgtgaaaattgctaaatatgtcagctgttaaacatgtaagaactttcaatatattttagaggttcaaaaaaatcagatttttctttttgctcaggtcagattttgatgaagatgattttaaaatgagacaggacatcatgagcagaagcatcagcacagaaacgcaggctgcagggcatccaataaaaggaagcccagagatcccagggactgtctacctgacttctgagatatatcagcctgcttgtacctctgccatggtacacctgatggtcatggagactgttcaggttctcaaatgccggctgaaggcaggcagccctgcgccctttcctccttatccagagttgtgtgatgctcgttgatctccctcgccctgatgagggatccgcagggggcgtgaggtcccaggactctaggtggtcagttggggaggattggacacaggaacagtagccgacttaatttattttaaaattttagatattggcaagaaaagagtgttttaaccgggtgtcataatgagagagaatgttgaattccaatctgctaagggcgtgtaaacctactaaagctcacgcctccctctgattacaatgaaaactggacaaaaatcaactacatatggactctgaaaaatataaacaggtagattgtggagaatgttaaaacctggagaagggaccctctcggggtggttttcctgttttcttctctcctggatttctccctagagccagtcttcatcatgtagtggcatggtggcataggtagctagtaatcctgtagcaaccccatcttttggcccagaggagtcagagagagcagcacctgcaggccagggagtgtgggggaaaaccagaagagagagccaaagaagccccccagttctgttcatgaacttgcactagcctcagcctaatttcagaacaacaccatctggggacagactcaaaccagcccagcaaaggcccagaggactgactgatgactggctgaggttagaaccatccatacaggtatctgactaactcttgaatggtgtatgtgctagacaggcatgaagcaagatggcaaggcttagagaaccgaactgagatttgaaccatctgcacaagcatgtggctggctactggatgatacacgtgtgatacaggccaatatgatcacaggaaatttgaatttgaaccacttcccttagaaagtgtgacagaaattgtggtcagaagccaattagtttataagtaaaaaaaaataataatctccagaagattaaaacagaatccagagtttacatattttaacattgacagtatccaggagacagtaccaaaggactcgatgtacaaagaataagaaaaaaatgtaataaatttccaagggaaaatgacagtcaacagatagcaaacctaagaggacccagatattgaaatgaccaaagaatttaaagtagcttttataactatgatcaatgaggtaaagaaaatgcacttgaaatgaatgaaaggttgggagttctcaggggagaataggaatttaccagaaaatctaatacaaaggttagaaatgaaactacaacaccttaaataaaaaagagttgcttgatgggttcagtagtggagtgactatgacagagcaaagagttagtgaactgaaatagatcagtgtaaattatccaatctaaagaacttagagaaaatttttttacattgccagagctcatgcagctgtggaacacgaccaaaaattggagtttcactgaagaataagaaactcactcaaaaccacacaactacatggaaattgaacaaccttctcctgaatgactcctgggtaaataatgaaatcaaggcagaaatcaagaagttctttgaaaccaaagagaacaaagaaaacctctgggatgcagctaaagcagtggtaagaggggaatttacagcaccaaatgcccacatcagaaagctagaaagatgtcatatcgacaccctaagatcacaactaaaataactagagaaccaagagcaaacaaaccctaaagctagcagaagacaataaataaccaagatcagagtgaagccgaaggagctagagacatgaaaagcccttcaaataatcaatgaatctaggagttggtattttgaaagaatcaataggacaggtagactgctaactagactagtaaagaagaaaagagagaagaatcaaatagacacaataaaaaaatgataaagaggatatcaccactgaccccacagaaatacaaacaaccatcagagaatactataaacatctctatgcaaataaactagaaaatctagaagaaatggataaattcctggacacatacaccctcccaggactgaacctggaagaagttgaatccctgaatagaccaatagcaagttctgaaattgaggcagtaatgaatatttaacagcctacccataataaaaagcccaggataagaggatttatagctgaattctaccagaggtacaaagaggagctggtaccatttcttctgaaacaattccaaacaattgaaaaggagggacttctccctaactaattttatgaggccagcatcatcctgataccaaaacctggcagagttacaacaacaaaaaaagaaaacttcaggccaatatccctgatgaaaactgatgcaaaaatcctcaataaaatacaggcaaattgaatccagcagcacatcaaaaagcttatccaccacgatcaagtcggcttcgtccttcaggtgaaaggctggttcaacctactcaaatcaataaatgtaatccatcacataaatagaactaaagataaaaaccacatgattatctcaatagacacaaaaaaggcctttgataaaattcaacgtcctttcatgttaaaaactctcaataaactaggtattgatggaactgtacctcaaaataataagaatcatttatgacaaacccacagccagtatcatactagacaaggggcaaaagctggaagcattcccattgaaaactgacataagacaaggatgcactctctcaccactcctattcaacatagtattggaagttctggccagggcaatcaggcaagagaaagaaaggtgtattcaaataggaagagaggaagtcaaactgtctctgtttgcagatgacatgatcctatgtctagaaaaccccatcctctcagtccaaaagctcctttagctgataaacaacttcagcaaagtctcaggatacaaaaacaatgtgcaagaatcacaggcattcctatacaccaacaatacacaagcagagagtgaaatcataagtgaactcccattcacaattgctacaaagagaataaaaaacctaggaatacagctaacaagggaagtgaaggacttctttaaggagaactacaaattcactgctcaaggaaaacaaagaggacacaaagaaatggaaaaacataccatgttcatggataggaagaagaatcaatattgtgaaaatggccatactgtccaaagtaatttatagattcaatgctattcccattaaactaccattgacattcttcacagaattggaaaaaaaactactttaaaattaaaatggaatcaaaaacgagtgcatatagccaagataatcctaagcaaaaagaacaaagctggcagcatcatgccgcccaatttcaaactataccaccaggctacagtaaccaaaacagcatggtactggcacaaaaacagacacatagaccaatggaacagaatagagatctcagaaataagaccgcacatctacaaccatctgatcttcagcaaacctgacaaaaacaagcaatggggataggattccctatttaataaatggtgctgggaaaactggccagccacatgcagaaaattgaaactgaaccctttccttacaccttatacaaaaattaactcaagatggattaaagacttaaatataaaacccaaaattttacaaatcctagaagaaaatctaggcaataccattcaggacataggcacaaacatagatttcatgacaaaaatgtaaaaagcaattgcaacaaaagcaaaaattgacgaatgggatctaattaaactaaagaacttctgcacagcaaaagaaactaacatcagaatgagcagacaacctacagaatgggagaaaatttttgcactctatctatctgacaaaggtctaatatccagaatctacaaggaacttaaacaaatttacaataaaaaaaccaacaaccacattaaaaattgggcaaaggacatgaacagacacttctcaaaagaagacatttatgcaaccaacaaacttaagaaaaaaatctcaacatcactaatcgttaaagaaatgcaaagcaaaaccacaatgagatcacacatcagtcagaatggcaattatttaaaagtcaagaaacaacagatgctggtgaggctatggagaaataggaatgcttttacactgttggtgtaaatctaaattagttcaacgattgtggaagacagtgtggtgattcctcagagacctagggcccaaaataccatttgacccagcaattccattgctgggtatatacccaaaggaatataaatcattctgctataaagatacatgcacttatatgttcactgcagcactattcacaatagcaaagacatggaatcatcccaaatgccctacaatgatagcctggataaagaaaatgtggtacatatacaacatgcaatactctgcagccataaaaaggaacaaggtcatgtccttttaagggacatgatggagctggaagctgttatcctcggcaagttagcacaggaacagaaaaccaagctctgcatgttctcatttataagtgggagccgaacgaagagaacaatggatagagggaggggaacaacccacactggatcctgtcaagggggaaaagggggagggagaacatcagataaatagctaatgcatgtggggcttaatacctacgtgatgagttgataggtgcagcaaactaccatggcacacatttacctatgtaataaacctatacttcctgcacatgtgtcccgggacttaaaataaaatttaaaaaagaataaatattttgaaatattaaaaacaattatagtttcagaggagcaagagattaagagaaaaagatatttgaagaggtaatgacagaattgtcaatctttgcaaagacacatttacaatttcacaaaattcagtgaaaacacaggatgaaataaaggaaaacatgcctagacacatcataatcatagtgctgaaaactaaaaataaggaaaatgtctcaaaaacagtgagagaagagtgatacattacatgcaagggactatgatttgaatgactgcaaatttctgatcagaaatcctggaggcaagtagatagtggagcaccttctttaagtgctgaaagaaaagaacttttaagccagaattctctatccagcaaaataatccttcaggaataaaagcaaaaaagagagacattctcagatggaggaaatgactggaattcatttccagcagacctgctctataagacatgttaatggaatttctgcaggatgaagcaaaatgatactacagagaaattagatctttagggatgaagaacagcagaaatggtaaatagtaggtaagtgtaaaagataacgtttttccctcttacgttcttcaaaataggtttgatggttgaaagtataaattataatattgtctggtgggagttttaatgtatatagatgtaatatgtatgacaactataccataagaggaaaggggagaggtaaagtgacctatatcatttcaaggcttgtatatttcacttgatgcaataaaactttgtagagaagttatgtatgtatattttaattcacggagtaagtactaaaatataattaaaaattaattaaaatattaatatttaatacttaataataatattattaaaagccaactgatgaaaatacaatattcaagtaacccaaaggaaagcaaaaaatgggcacagaaatgaataaaaaaagagacaaacagaaaataaataattttgttgacctgaatgcagctatatcaataattgtgttaactgcaaacattcccattaacaggaaaatattgagaaagcagataaggaagtaaggctctaatatatgctgctcttaagagacatacttttacccttgatcttagctgaaaggctgagcaatgatatgggacatgcttttaaattaagcatagagatatgttgaaagtaaatgaatggaaaaatacatagcatgcaggtaataagcataaaaggccaaagtggcatagaataaacttcagtgcacataatgtaattggaaataatgagggacatttaataataataaatgggacagattataaggaagatataacaattataaatgtccctggtaaatactcaagatgcaattgattcactaaagtaaaacaaaatagacaattccacaatcatagaagaagattttatcactcttcagaaattgatagaacacctagacaaaaaaaaatcaggaaagccatagaagctatgaataacattatcaaccacgttgattcaattgacatttgtagaacactatatccaacaaccacagaattcaatcttgtcatgcgtgcacggtcaattcaccaagattataatattacatcataaggattatatactctgaccacaacaaatttaagttagaaatcaatagcagtctaggaaaacctcaatgtctggaaagtcaatgatacacttctagttaaatcatgagtcaaaaatgaaatcacaagggaataagataatattacaaagcaaaatgttgatgaaaatatataaaaaatttttgagtgcacctaaagttagcttagagggaaacttgtagatgaaatacaacagaaaataagaaagatctaaaattatctaatctaatgttctactctaagaagctggaatggaaagtaaaactaaaatacataggaagaagaaactaataaccataagatcagaatcaacaaagtaggaaacagacaaagcagaaaaaaacctactaagccaaaaagctggttctttgaaaagaaacaattgaacacacatcaccaatatcatcaagaaaagagaggtgaccaaacacaaaccctacaggaattaaaaaaaataagagaatctattaacaaatttataccaacacagtcaacaacctacatgaaatggaatagttccttaaaaaatacaacttaccaaaatagactcgttttaatagaaaatcaaaatagagttatatcaataaagcagctgaattagtaattaaaattatttacagaaggaaaagtccaaacacaaatggcttccctgtttaattttctcaaacattgagtaagaaataataccaatcctataaatctctttcagaaaataatggaggtggaggacagttccccacttattttgtaggtctagtattaccctgatattaagacaaacgtattatgtgaaaagaaaattacagatcaccatctcccactcacatagatccaaacaagatatcaaatcaaatgctatggtatataaaatagtacagcataaccaaaaaaagtttattccagaaatccaaggttgatttaacattcaataattagtataattttccatattaacagattgcaggagaaaaaccatatgatcatttcaataaatgcagaaaaagcattagagagcaaaccatgaattctcaaactgatgaaaggcatttttgaaaaacctagagccaaccttatacttcatggcgaaaaacttaattatttttccatgagactggcagcaaggcagtcaccttttccgttcaacagtcaatgtactgaagggcctagttcttgtaatatgacaatataaagaaataaagcacagaaaaatgaaaatgagagaagtaaaactgttcttgtttgtaggctatatgattgtttatgtagaaaatctcaagtggtctacaaaaaatccagtactaccagcactaatatataaatttagcaaggtcagaagatacaagatcagtatccaaaaatcaatatattctcatattctagcgcataattggaaaatatttaaggaacaattgcatttataatgataccaaaaccctaagaaacctaggaataaaccttaaaaaaaaagtatgctcaagattcctataccaaaaattaccgagatattttgaaaagaaatttttgtaaaagatctaaagatctaatgaagagatatagtctgtccatagataagaagactcagtgttgtttagtgtgcagttcttcccacattgacttacagatttaagtgcaattgtaataaaaattgaactaggtttttctgcagagaatgacaagctaattacacaatttatgtagacattcaaaggactaaattcaaataactaaagcatttttttccccaaaaggacaacttttggagcacttacctgatttcctgacctactacaaagttatagtaatcaagactgtggtcctggcaaaagatagatatagattaagggaacagaagagagagtccagaaatagactctgtcgatgtgttatgtgttatttaaatatacaactgattttaaaccacagtggcaaagcaatttatttaggaaagaaaacattttttcaacaaatggtggtgaatcaactggatatctgtataaaaccaaaagaatgctagagttgatttgtagttttactccattatctgtttattgtagtatctttatagtgatgatctctttttcgttgttgtttttggtgactctctttcccactttctacttaaaattatcattttctcttcacttctttgggttcaatttgtcattttcttaacttacaaagatggatacttagcttttgattttcatgcttcatatttcccattgtgtatatttaagactataaatttccctgtagctgcatccctcaagttttcatgtgcattttgattgcatttacattttatttattcaaaattattttaaatttctattatgatttattaccttagttttcttgactagtcaatttttgactatttgatttgattgagaattatttaaaattctatttcccctttcctggcagttatatactcactcttttagtatttttagtggtttaatgtcatctggagatgatagccttcattcttaactcattaagggcccatgttaattggtacttttaaactcttcaacccctaatttctttaagcaaaattcctcttttacattcagtatctatgaattctcatccatgcggttttggggtctggctaaatctgttttggttgtttctgctctcattcatgctgcttgtcttcttgtgtccctggagatgcaagactataatctcatcacttcatcgtattctgtgggattcctgagggcctgcaggcgggatgctttcctccagaaactgctgtgtctgcttcttctggatgccagggaataattttagtgcatttcaaggatcttggctcaatgtgagaaacagtggagcctacaaccctcacaggtgttcacacctcctctgacttcagtgcttgatcagcctcgaggttccaggcagttccatcctgtgccactcaagtcttgccgctcctagacagctgcaggaaatgttttcgtggggagagagattccttggaaaaccataccttgtcttgctaatctagaatgtgttaaaaagtatgttttatctagggtccatttgtttggctgaagaagggactcttagacctcctagtttatcattttgaaataagtggtagcaatgatttattgtattggcttatttcagtgggacaaggatgtcaggtcattgctgaatcagcatttctgtgacagactaatgatgtttcacatcctgatttataccacacaatcatcttttcactgtataagctgatgaaggagacaagtaatatgtataatcttcaactgtacataaacttcacatactgtaaaatacacattatatacctacagtgttaggcttgatagatagggatgtgctagataattactttattttgtaaaagagtgtatttgtattttcttcatattttgattttttttaaattaagagatcatttattttgagctgagttattaggtgcaatattcaagttttttgaagattttactttattttgtcttacattacataacgcagagcatgatatttaggataattatatgacactaaatatgtaaatataaatgtctataggtacacatcaagaggtgcacaccatactctgtgtgcatgtggggggcatatacacacacaaccatctctatttggtatttggcagaacattttaatctggtttaggcctctgatttttctttcaactgatgatatcaaacaaaataaaaggtatagctacattcaatattttttcaattttaaagtgttatttaataaaatttggattatgataaattattcgttctttaacagtgggtgattttatcccccctgggaacattggttcttaacagggggtgattttactcccccagaggacagtggctgtgtctggagacatctttggctgtcacactggtgttggtgaggtgccactggcatctagtggcaccaggccagggctgctacgcaacattttataatgcacgggccagccccacagccaagaacgatctggctctaagttagcagggcgagggtgagaaaccctgctctaaagagattctccttatgacttagttgatataaaagcaaacttgatggagaatcgtgattgaagacccaacatttgggctccatagcttttaaatgaaagtcggctaacaactgtacatgcagattgagattctgaagcttaatttaaacttggacaagctggccggcacgttggctcacgcctgtaatcccagcactttgggaggccaaggcaggcagatcacctgaggtcacgagttcgagaccagcctggccaacatggcgaagccccatctctactaaaaatacaaaaattagccaggcatggttgtgggcacctgtaatcccagctacttgggaggctgaggcaggagaatcacttgaacccgggaggtggaggttgcagtgaaccgagatcgtgccactgcactccagcctgagcaatagagcaagactctgtctcaaaaaaaaaaaaaaaattaaaaaattaaaagaaaaaagcgcagacaagctgctgtttccaatatttgcagtctttcagcgcgatggaatcacagtgaaaaggccacacccacagaggtgctgggcagctgagccaccggcacctgttgctttccggtgacctctcacagtggctcggtcgtgagcctctgggcatccctgtgtgggaccttggccacctgggcagaaggctcctgcgtctcatcttctctcttctactctttcctgcctttccctgagtacagttttctgaatctgcctagtactgtgaaaatagttacatgtgccagttaaatagacttttcctttctttctttgaagattacaaaaactgcattaaaaatgtcttttaaaactctgtgatgtttaactttaaaaagaaattggaaatgcgactttcttgaaagatctatatggagtggtatttcattatgtacgattgaacagtatctttatacacaggtcttaaagagagtcttccattcggatttaaatttaacatggaccttaactcaaatcaatgagggatttctgccactgctgttggactttttctccatgaatcttcgttgtgcatatatgatagtaaattatttatagactgtgtatttgagtctgatcttttataagaagcaggaatctgggcctaccttatgttcacgtcttttcattttcaagactttttttttaaatcttgcatatattttcggttctaaactgattctcaccacacatcctttcttctaggcattggcacatctccacttaatagaatatgttggagaacaaactgctttgctaataaaggtaaaataaatgctataatagaaggcactccagccactgttctttgattttgtgaaaaaaattaaaaaaaaaaagcactctggtaagaacaggtcccattaattatgtaaaaaggcacagcagggaacctgttctatcctgtgcagcccagagatgaagggagactttttccgaagaatatgtaattacagatgcctgctcttttgcttttagcctttatttaaagcctgtctgagaaggagtgggattgacaccagcctcagtaaatgagtgctgcaggcgccccagccccaggggtctgccgggccatcaggtcaatgtgaccagtgtgcgcagccaccacatggggatgaggggcagggtcactctgcctccccatccagggggctggcaggtctgggcatggctgggctttgctggtagaaacccagcagaggctcctggtgtgggtgtggccctggcttgcacacctatgtctgccttggtctcgtgatgggtaagaggaaggactaacaccctcgggcccctctgagtctcgcggctggtgggtctgaccctaagtgcatgcgatggaacactgcagctgctattgtcctccttccagatggtcccagaggagcagcgcctcatagccgccattgtcctggtggtgtgggtctcagccctggcgtcgtccctgattgacaacatcccgttcactgctaccatggtgagttgcacatgtccatgtcgacggctcaactttagcctggacatagcctggggctcaccctcccttcctaaggcagcagaggatgaagcctgcccctctgctgcactcacaggtgtagaggacgaaagtgagcagagcccagggcagctgggtggggagtgccgagagcccagactgcaggctgggagccgaggctctgcagctgccgtggacagcacgtcctggggtgactggtgatctcgaggtcagccccactgagagctgccacccctcccagaaaaggctgtgcttgcttgcttgctttctctctttctttctctttctttctttctctctctctttctttctttctttctttctttttctttctttctttctttcctttctgtctttccttccctccctccctccctcccttccttccttctttccttccttccttccttccttctttccttccttccttctttccttccttccttcctttcgaaaattgtgagacatcaaaagatagagacttgcatcttcatttgcggcggaggcaaaagctattctaaccagcctgtgtgtctcctagtgcttggcctgggcaagatctttcattctctgtgtggtcttgagccccagccaggattggaagtacacatcgaagacctttagttgggcagatgagcctgttcctggcgtgacttctgccgtcactgattgcttggctcagggcaggaactgggaatccaggtgtggcaaagtaaagataggcccaggggcttgcacacaagtctctggggtcctctcacaaatacttgaggtcccaggtgtgcagggcacaggccagaagcctggtgagcactccccatggcaggacacaggacaggggagagccctctgttcttctgactctgagggtctcccccttccccgcagggaacatcccatgcaagggggtcccaagacatcccaccgccctgtatagtattctgaacaatggcacccccgggctggagcagcaggcctggctgtgtggggagaagggcaggccaggctcatgcagcgccgaccttaggcggatctgggaacctgcatccctcgcttgcagcctggaatttagtttctgcctaggttggccctctagttgcttggctgttgctctccttccagggcctgggtgtggtaatcctgaactaactcggtggctgttatttttttggtgaagttccaaattggagaactcttgcggctgttgtcaaatgtcccggctgtggcccagctggctccacctctccctgcgccccaggcaggctgatgccttctggcagggctgcccttacccaatcctcagcttcatcctgtgcattcatcctgttctccagggaaacacagtccacaggagactccgcgctgtcccagccaatgaggccacagttgcggaccgagcgcaggaccccgacacagcctccatcagtgcttccttctgaccctgcgctcacagctgaaccccacctctggggggctctgaggtttgcacccagatcctttctgggactgaattagaagagccctagcattgatgatttaagttgctgctttttctgagaataggacactttcacagttttgttccataaatttttatgactacctaaaatttaactttaaaaaatggaatcagagacaatagtacaacaaatatccatatgttcaccacagaaagtgagaaagtgtcaacattttatcctctttgcctcagaatttgttgtgtgttttatcaagaaatacaacattacagataaacaggcaggtctctgttcttcccctggagtctcaggaccatctctgccctcatgaatgtgggtcccatccatctctgcagtggccgctgtgggggtgctgagggtgggatgctggctcttgtgtgtccacaggggcagaagccacatacagcatgaccacagcagccacagggtgcagaggtggacacacagctcttcaaagcccatgcatctccccggagtgactgtgccacgctagcatgaggtgtctgcagtggccacatcacgggagggacatggggagccactggggtttgctgcctcaggctggaagcggcatgcagcgatggtcacaatccttgggtgggaaggggacatgtggcccttccctggagcagggatctgcgaagtgggtgggcgtcgaggtctctccactttccctcactcccttctcccctcttttcctttgagtgtcttttcaccacattttttaaaaagctgtattgaagtcattgacaaaaatctgcacctatcgaatgtataagttttcatgaatttggacatatatgtgtatacctgtgataatatcaccacaatcaaggtactgaacgcatgcatcatctccatacatgtgcttatgtgtatatatgtgtgcttcatggtaagaacacttaacacccatctgacctcttagtacactttgaagtgcatgataccatattaacgctaggcactgtgtcataccacggcccctggaatgtacccatctgggataactgaaactctacccattgagcagcctctgcccatccccctccctccacccccgacagccaccattctactctctgcttccgtgagcgtgacgattttagattccacacacgatggaatcaggcggtgttgctccttctgtaactcgcttatctcacatagcataatgccgtctgcgttcatccatgttgtcacaaatggcaggattttctgctcttttaagtccgaatcacctttcattgcatatatattcatataccacattttctttatccacatgtccatcagtggacacgcaagtttttcccatgtcttggctattctgagtaatgctacagtgaaaatgggagtacagctatttcttcttcgagagcctgatttccgctgcaggtggttagaagatatggtctatagggtttaatgcttagaaacccccaaaacatcatctgacttaccatgtgactgtttttctccagctgcacgcctaaaaagctgcatgtcagcttctgcacactgcggctgcttcggtcactccgtgtttggcttctgcccctgctgacacacaggagccaggatcctgccccagctcctcccacagtgggctgctgcataggtggttacgacttgaattcatgaaggcagctccctgaggagagggaaggatgaaaacaatcctggggcctgagggaggaaaggagcttcacatttatttataatattttgttccttaaaaaataagcaaaaaggaaatcctgcagcaaaggagatgaaatgttcaaattttctcagtgtctgtgagcagttaacatacatatatattgctcatataatgtgagcattaacatacataagcatgtcgttgtgttgttatcctctagattcacttatctcttttaaatcaatctgttttgatacagcagagaactttgttaattggtttgtttctccttgcacttcagcacgtttttgcattatttactttgtgatcatattaggtgttaaaagttcattatctagtaacttcacagcgactggtttcttttaccttgtgtgaggtctccatctctgctctgagcctctgccaggtttatctttttctagtcctttatttatttattttaaattctttttccaattgcatttttaagcagcatgcaagtagatttttaaaattcaaagcagattatcttttaagagaatagtttaacatgtttacatttattgtaatgacttatcgacttgaactaagtaccatcatttcactttttaatgctttttccttgctaattcttttttttcaccatcatttcctgacttctttagattgatacatcatacctccgcatccatcaactggttttgaaggtactgattttattcctagtcctttagtggaaatcattctgtttgtaatgcacctagtggtatcaacatttcaaacaacagttgcagtgaacagaacctattttagttagtttaagatgagaaggagtttatctagggatagtacatagttcttggaatttctgagaatttctcaactgcacactgggaatggggggcggctgcccacaagcccccagcttttgcagcttgccctgagtgctcaggatccctgccccgacgctggctgctgagtccagggacttctgtcagcctgctcttgagtatgccttgtcacacctctcctccaaattctccagactggcctctggagcaggtgtgtctgattggaggaacccatgcctgttctagctgcaatgcaggtggcaaaagtgtgtttctggcttctgccttggaggcccagaactcacaaaacagatctccgaggaggcttcaaagcctttctccatccctacctcagcgctttctcctcgatgcttctgtgcttcctggtgcagagcctcgcttgccctctgggtcccacagtactgtgcacctacatccaccaagtcactggacaagcggattgtcaagagtgtctgcagctgtctgggaattccagccgtttgtgtttgtagcctcattcactagcgttatacctggcaccaaaaagatatttagcaagtgtttgcagatgaataggaaagtgaactaactgcagtagattaattgtcctggaataactctgtgtctgcctcctccctggcctgccatcctctgctactctgttactgagggagctggacaccccatgcttgctgcatgtctcagagtcgcagaccctagctgtgcacctccctcctgccagaccacctgccactcgagacacaccctcatcttcagtgatgtggtgccacctcttcagcacgacgctggggctcttgtgcctttgacagtgctgttctttgccactggtggcagctgtccctctcaactccctccttccctgtactgggagccagccacaccaacctatagccctctacattgcctgggtgggagctggtcctttctctggatctgccttccctctggcagcctctgggtacgatggcctgccctctgggtggaggtagggtgtcctgctcaggcccccagtcatgtaaggcaactcattcatagtaaatcctcatgtctacagttttctcccactggttctggcttctgacagatgcagtgataggaatggctctttgggaggtgatctgggtttcctgcctacagaggggcccctttgactgggaggacctttacactgcacagctgtggagccctctgaacccagggagtgacgaggagagtatgtgggtggcaacgcgggtctagttcaggcctgagatctttgcagtcatgcgtccctctgcacctgctgctgatgtagagagaaggcagtgccgcctccttgccattctgtaacgtttgtgccctggcctggcttatgtagatctacagaattcaggcatctgagcttcttctgtagttggccaggcttcttggtcctcagggttggcgctaaccaaacacccttagagtaactggtcctctctgcacccactcgggaggcctgctcagtgttcaggtggggaatggacaagaagaccaaagaacattcatgaaaatgcatcaggagagacaggtgtgcctgcccacagctgcagacacagcatgaacacagggtgcagtgcctgggctctcgccgcccagtcagcagagctgcctgccttccctgcctcctcgccagcctctgtcagatgcagaaacacacctctggctggcgtcattggccaggtcaacaggacactcttcactggggattttaacatgaatagaaccttaaaaagggtcagagagcgggcaggtgcagttgccacctccagtgacatgaatgcaggccactgtgtaggtggggagagctggcgggggcctgagctgtgtggggcatttcagcagccttcgcgtggtattccagggaattgagtctcaagagacaaaacagaacccatctcttctccgatggcgtcatctctccaagcgtgtcttcagcttggggttgtttctgctacatttgcgttgtcagctatggcctgagagcaacaggtgaactctgttcacatttgttcaggatatttctcttcctatttcttttcttggcatggagacgtttaaccaatatttccatacagggaaatccctttcacacccgccgcctcttcttccttcctcttgccctcttggtgggcaggcggcctctgtgggtggcgttcttagggctccattgcatggccctaaagaccgagttggaaccgctgagaaacagcataatgactgagaattccctgacagtctttctccatttaaaccttaacttttcaacctcatgtgcttgaacaggaagaatcctcaggcaactttcaagttaaaagattattactcttgtcctgaatgttgaattcaaaggctggtaatttatgcacataaatctgtgggtttccttcaactgacttgttggcactcatcattatctatgctgtcacccagcctctgggtggaaggcagtttctcaggcatctcctttccccggctttctttgcagtctcgccccatcccatagccctgcgggaggtatcaggacagacatcctgggctatcacacctggcacaggagagcactctttcagaggatgtgagagtcaaaaacatttcatttgagctttagctttacaattttttaaaaaacttaatctcatttttgttttaactcctcctgtcctgaaacatccaggaacataattatgtggaggatcaaacccagcctggcggattgcaattaggtttaataacatgagcagttggcactattagcagctcaggttctgcaggaggtggatctgggcttgaatcccaactctgccattgtgcaagctaaggaggtgctagagttagagaaacagaaatgggaggagcacagaaatgccattttcccccatttgcttggtgctgagcctggtactgatgggctgtgtgggttacaagtctgccccggacaggtgcacaatggatgccctctgggtggttggggagcagcctcagaggggcactgccggcccagaagtgagggtctcccatcttccatggtccacagaccagccactacaccgccagaccccagctccatggcaccccgtgaaatccaagtggcacatttaggggaccagtagtgtgagagaagattatccactgtgtcccaccgacacaatacaacaaatgataaattatgaggacactcagagatttaagcacagcacaaaaaatagtttctggaactaaaacctataatgttttcaacaaaaaatattgaataatgaattgaagaagagcaaagtgttaggcctgagttgctgtgcttgcagccaagtgagagacatatgtgcaggtacagaacaaaagcaaagagaaacagagtcgtgaaaaagggtgagagatttggaggcgagacccaggggacccagcgtggccatgacagcagttccagaatggggagaaggaatgcattgtattgaaaaagcacagccctttaccctcagatggggcttgggcaccggcagcatcacagcactgggaacttctaacaggtcagggtctcagatgctcagacccttgagtcagagcctgcatttggacaaggtgccgggtgacccactccacacattggcattggagaagtgctggtctaggcccggcccatcaggaggacttgtgcccctgccagctataaatagctctcccctgcctcatggcaatccatatctcagctctcagaatcccagtgagggtgcagccttccctgtgcttacctgaggcacttgtacacctttaccaggggatccgcccggaactgctgctgggtggctgctgtgtcccacacagccaggagccgactgcagcatccctcacccatgccccaggcagctctgccctcctcccaccgctgctctgtgcctgccatctgcctaggtcacctctgcccctgcccagttagttgcagcctcagggggcctctccttcctgacctgtcaggtcagccctgccagcctcccgctgatggttagtgccttctcggccagcttcccaggcccctgagtcagacccattgcctgggccagaggtcaagcagtgaggaccatgtgccttccagctgtcacacagcggaaaaggagcttcagatgtatatttagatgaattatgatgttgtggtatttaaatttgaaagtatacatttaaaagaatgacgggatgcctttgtttaagaatgttgatatagactatgtccttggggactattgtatattggaatggcaaatttgacatacgaacttaaaatgtctgaggaggctgggtacggaggctcatgcctggaatcctagcactttgggaagctgaggcaagtggatcacctgagatcaagagttcggtaccagcctggccaacatggtaaaagcctgtctctactaaaaatacaaacattagctgggcatagtggcacacacctgtaatcccagctactcaggagactgaggcaggggaatggcttgaacccagggggcggaggttgcagtgagccgagatcgcaccacttcactccagtctgggcgaaagagtgaaactccatctcaaaaaaaaaaaaaaatgtctgaggaggtctacttttttttcaaagttctttggcgctgggcaggcagcatgtccccttgtatgggtgctgtgcactgtgcatgcctcttgtgccccatcaggcctccagcactgcccctcctttgaggctgatgaccatgctttctgtccgtgaggactcgaggctgatgaccacgctttctgtgaggacttgaggctgacgaccacgctttctgtccgtgaggactcgaggctgacgaccatgctttctgtccgtgaggactcgaggctgacgaccatgctttctgtccatgaggactcgaggctgacgaccgcgctttctgtccatgaggacttgaggctgacgatcacgctttctgtctgtgaggactcaaggctgacgaccatgctttctctccatgaggacttgaggctgatgaccatgctttctgtctgtgaggacgtaaaagcaaccatgtgggcactttccacgtgacgccgtggccacccagtgcatcctggctgcattccgggtgtgtggggggatgtctggctcccaacgaagaccggtgccttcacccaggaccacatgccactgtcctccctgcatcatttattcttcactctgctgatcattcgcaggcggatccagacttgctgccgtgtctccaggccttcccgccactcccctatttcctcagtttcctgtagccagacacttcgaaagggagtctgaaactttcttcactttttcttggctttactgcaattgagtttttcttccataatccatggacatagttctctccaagatcactaaggactagtgcccgccctcgagagagacccccttggaacctggccagtcagcaacatgacatggaggccacccctcagaatctttccccgcctggcccttcaggtactcctcctccctgcacggggctccttctcctcgcctccttccatgaccctctccatcttccaagcccagaaccctggaatcagctctgacctccactctctagactcacggctgcaggggtctcatctgaacacttactccaagtgccatccacagcaacctctcctgggctgctccccagagcctagccccggttgtccacctgcctctccatttctctcctggggcactgcaggtgttacagacttaacgtgtcccgaactgaaatcctgattccatctttccccactcttccttgccctcataaatcgtgactccgttctctcagttgctcaagcccctgaggctgagagccagctaacacctcaccttctctaacaccccatggccagctgcccctcaaaggttttgaatctgatccattcttgccatctatactcctgtcccctgaggccccagcaaggaccacatgccctcctgctgtcacacagtggaaaaggagcttcagacgtattgttcccaaatacattccaaattcttccttttgtttccactcttgccctgctcctgagagcctgtggtccacagaggctccctgctttggtatagcccaaggtcttggcgatggcttgcacctctcctaggcctggctgctgcttcctccctgagcttacttcttactgctcttctctctgctgacttcactgcagccatagtggcctccttggatttcaacctagcaatcccactgctgagtgtatacccaaaggagatggaatcattctaccaaaaagacatgtgcccttgcgtgtccatcactatgctactcacagtagcgaaaacatggaatcaacctagatgcccatcagtggtggattgaataaagaaaatgtggtacataaacactgtggaataccacacagtcataaaaacaatgagatcatgttccttgcagcaacatggatggacctggtggttattatcctaatcgaattcacacagaaacagaaaaccaaatattacatgttctcacttgtaagtggcagctaaatattgggtacatatgacacaaagaagggaataataaacagtggcgttttcagaagggaggagtgagggatgaggacgagggttgaaaaactaccgagcaggtactatgctcactgcttgggtgacaggaacatttgaagtccaaatcccagcatcacacaagatatccatgtaacaaacctgcaggtgtgctcccctgactctaaaataaattgattataaaggcttttgcacttttgtatgctttctgtctgagattctattcacacagatcattagagcttggtcttgctccttcaccttttattgagttttgcaaaattgctccttcccagtgctaaattgacaacctcatcctccctgtctccctttttgctttatttttttccccataacacttaataccaccaagcatactgtgtattttacttattcattattcttttgagctgcttagttgttcaatgtttgcttttaaataaaattatacattcatacagtttaaagtgctaaatcagcctggaattcttgtttaaaaaatagcacctttataactttcatcacatttctttttctcacagaaaaccttttttatcctttgccactttttattttattttattttatattttgtttcctgagtgctgctatctgccatcttttttcccaagccctggggtctttccatcgatgtcatgtttgtggaggcaatggcttccttccgttcctttcttcctgtaagaacgttggtatagactacatcccaatttcatcaggaacattgatctgtagttttcttttcttgtagtggctttgtctgacttagtatcagggtaatgctggcctcatggaatgagttaggaagtattccctcttcttcattttttgaaacagtttttggaacgttggtattaatttttctttaaatgtttggtagaatgcaccagtgaagccatgtggtcctagacttttctttgttgggaattttttggttactgattcagtgtccttactagttacagatctaatcaaatattctattttttcatgagtcagttttggtagattgtgtatttctagaaatttatttatttcacttagttaacacaatttgttggcatgtaattgtttatagttttcttttataatcctttttatttctgtaagattggtaataatgtttccactttagtttttgattttagtcgtttgtattttatctctttttcttagtcaatctagataaaactttgacaatatcgtcgatcctttcaaggaatcagcttttggttttattgactttctctattttttctattcttcatcttatttatctctcttctaatctatcttatttccctcattctactagctttaggtttagtttgcttgcctttttatagtttcttaaggtgtgaagttaggttatttatttgaggtatttcttcttttataatatatgcatttatagctgtaaatgttcctattagcactgctttcattgaatttcacaagttttagtatgttgtgtcttcatttctctttgtcttaggtgttttctgattttccttgtaatttcttctttaactcattggttgtttaatatttgtaaattttctctttttccttctgttactgatttctagtttcattctactgtaattagaaaagatactatgtattattttaatcttttaaaatttattgagaattgttttgtgccctacatgtggtctatcttggggaatattttatgtctccaaattttatagtagaaatatctatttctccttcaattatgccaatttttgtttcatatatttccacgttctatttttaggtgtgtaaatatttataattgttgtatcttccttctgtattgaatcatttataaatatataatgttattctttgtcttttgtaacctgtttttatttaaattctattttgtctgacaataatgtacccacctcagttctattttggttactatttacatgtaaaatattttttcttacttttaacttatttgtgtccttgtatctaaagagagtcacttgttaacaaaatgtgtaagatgtatcctgtttcttatccagtctgccaatttctgtttttttttttttttttctttctttctttttggaggcagagtttcactctattccccaggctggagtgcagtggtgtgatctcggctcactgcaacctctgcctcccaggttcaagtgattcttctgcctcagccgcctgagtagctgggattacaggtgcccaccaccacacctggctaatttttgtatttttagtagagatgaggtttcaccatgttggccaggctggtcttgaactcctgacctcaggtgaacaggagagtttaatccatttacaattagtgtaatttctgataaagaagtaattactctgccatgtatttcttttctgcatatcttagattttttgtttctcagtttctccattactgccttttttttttgtatttagttgatttttttgtagtgtacagttttgattaccttgttttaattttctgtatattttaatagttattttcttagtggttaccttggaaatttaaattaacatcctaaatatataacaacctgtcatgaataataccaaattagtttcaatagcatacagactatttagtccttacttcctttacagttcagtccttacttccttcatagattacatctttattagctgaatgcctattaaatatttttcctgtctctttctctccatcttctctttctggaaatcctataatgcatatgttggtagatttgatggtgtcccacaggtcctttgggctctgtttatttattttttttcttttactttctgctcctcaggcctacaatttcttctttttttgacattttaaattttatttatttttttaaattgtggtaaaacacatgtaacataaaatgcaccatcttaatcatttttaagtgtacagtttagtagcattaagtaaatttatattattgtacaactatcaccacgatccatttccagagctcttttccttgcaaaactaaaaccctgtacccattaaaaataattccccattccctagtcccccaaggccttggcaaccaccatcttactttctgtctcttatgaatttaaatattctagataagccctgataatttcaaacgtcgtatcttcaagttcactgatcctttcttcggcttcctcaattccactgttgaactcttgtagtgaggtttccatttaagttattatactttcaggtccagaatttctatttgattcctctttataatttatatctctttagtgatatttaaattctgtctgtacatcattttattgatttcctctaactctttgcctatggtttcctgtagttattgaacctctttaagatagctgaattaacatctttgactaataattctaatgcctagacttcttcagggatgatttctgtcaattgtttttctgtgaatgggccacactttcctatttgtttgtatgttgtgtaatcttctttgttaagagctgaacattttgagtattatgttgtggtaatactagagatctaattctcccattcctcagacattgctgagtcttgcttgttgagtgctggagccatccatttatgatttttccaaacattttttgaaaagtgtatggtcattgaagtttttcttctattatctctatagtcaactagtagactgacaaagatttccttaaatttctggctcccaaaaaatgtgtgtgtgtgtgtgtgtgtgtgtgtgtgtgttaggggtgtgtgtttgtgtgtgtgtacagaaataattactgccactttaaattccctggaagctgttccatcacttggaggttgaaacaatggccagcctctgtgctggcccctcagtgatcaaaacagtggccagcaatcaacatacataacctcagtttttggaggacaaggtcgttattgcctgccctgatatcagcaagtcacatcctaaacatgagctgccacccccacagcttcctgccacagggagagagatggggagtgacaaccactattaaaaaagccaaaattcaccaaaaccctttttatcagtctttcctgtggttgctgaaggtgtttgactacactctagacttccaaaatagttactgtttgaattgaattgtctccccaaaacatatactgaggtcctaaccccgggtactttggaatgtaaccttacatgaaaatagggcctttacagagataatcaagtttaaatcaggtcaccagggtgggccctaatccaatatgactgatgtccttacaaaaaggggaaattttggcacagacgcacacaggcacggggaaggctcctgtgtggctggagtgatgcacccacaagccaaggatggccaggattgccgcagacaccagtggggcaaggaaggaccctcccctagagccatcagagagcacagccaggccaacacctggtttcacactctcgccttcagagccgtgcggcaatgaagtcctgttgttttcagtacccagctcgtggtgctttgtgacagcagctacagggagctcatacagtagcttcagacagttcctgccagttcagtcatcctttaggcagaggtagattcctggagcttcctgctctgccatcttctgtgctgtcattcattagttttaaatttttctgtctgccactgtaaagcaagctctatgagggcagggatttttgtgtcttatatttactgtctgtctcttgtatctagagcagaaccagacacaaaatggaatattcagaataattattgactgaactaagaataaatgagcatagacaagataacatggtcccatccagtggaggagggataagtgttaaatgcaatgatggaagtaagctctgggcatagtgtgtgataaaatagcagccacattgaggaactcagggagacttctcagaggagagatgcccaagcctcttatgggctgagcgggaggctatgtgagggcaagagtgaccatgtgcctaggtggagatgtgggcatgggcaactgcacagaagtggcaggtggtgctcaggtgaaggcctgtgaagactgtagtgtgtgaggcagaggacagcctggcgagggagcgcttgcctcagattgaagggtgtggagtcaggtcagttgcatgggcagacttcagagatggaaaggtcatggctggctgcatggaggacagaattaaaggggcaaatggtgcatctatgttgtgggaaggagagcttgatcaaggcagggcctgggaggacaggccacagagttgcggggagacccttgggctctggagtttagggagctggttcttatcagaattgcaaatcccagagagggcttgctttgaaaacaatgtcagagcatactttttgaagcaatcagcctgtaacagaatctggcagttgtaagtatgcagtttggaacatggggtaggttttctctggctttgggtgatggacctcgcagcacaggagcacttgctggaatttccacatcactaagcttgaagacattgcctcctcccttgatactgcaatgcccccacaaggacccagggtcctgtgcttagttgttctgaccctgtctccttgttccgggtggcgtgccgtgttctgtagggtggaggctggctttgcaccaacagcatggtgctcagtgcctaggggccccgtggcctcacagtgatgtgtgtgtgttagctctgctcattgataactggctgttgtgagaagttgcacttcgctcactcctccgaagaacgaagacatcaagtctaaaggtgcctctatgataatcgcgtttatcataagacaacaaaagcaaagcttgaaaagtgcctcagggactgcatgggagcaccctgctgccaggagtttctgattctgcatcagattgatagacgcagaatcagatgcttttcctagcgtgctacttatttctcttccagtgtatatttgacgctactgacaacaaaaaattgagctgttcaacatgccccttgtgacccagcaaatatgaagggctccttctcagaccctgcaaggcaactctcgagaaccagaccctggactggtggagacatgtgcagtagcaggcacatgggtcagcggcctggctgcagcttcctggtctggactccgctggggctgggcggaccctgctccacatgtcctccccatggggactccccagggcagcagcagtgcccaggctccatcttctgttgtggccaagagcctgaacctccagaggggcatgcagaaacacaagatcttctgtccaacccacccacattctatcggtcaaaggaagccactaggcaagcccagaatctggggtggggaggaggacccacctgccccagtgggatgcagcagagggcacacacgaaatcctgctgcagcggtcaggagctgagagtgaatggatcttcccaagtaagccctaaggcacctctttcatgacattgggggactgagcacccagcagagggtggctctcttgccccttaattctcggcatcgaatattattgcacatcattcacatctccacactggggtccgctttctgtttgtgtttttgtgtaatgttttccagatcagccaccattggtgctctcctcctgctgctctttagagtggttgacatacgcaactgcccgggatggcgggcccaggggtctctccttcacaccctgtgggctctctgaggtgtctggtggggacaacatagctctccattctccggagcctcccggaggcaggctcaatggctgtgtccttcccagctccttctagcaacataagccacaagggggcatgctgtttgaacacaaatttctttttttttttttcttttattattatactttaagttttagggtacatgtgcacattgtgcaggttagttacatatgtatacatgtgccatgctggtgtgctgcacccattaactcgtcatttagcattaggtatatctcccaatgctatccctcccccctccccccaccccacaacagtccccagagtgtgatattccccttcctgtgtccatgtgatctcattgttcaattcccacctatgagtgagaatatgcggtgtttggttttttgttcttgcgataatttactgagaatgatgatttccaatttcatccatgtccctacaaaggacatgaactcatcattttttatggctgcatagtattccatggtgtatatgtgccacattttcttaatccagtctatcattgttggacatttgggttggttccaagtctttgctattgtgaatagtgccgcaataaacatacgtgtgcatgtgtctttatagcagcatgatttatagtcctttgggtatatacccagtaatgggatagctgggtcaaatggtatttctagttctagatccctgaggaatcgccacactgacttccacaatggttgaactagtttacagtcccaccaacagtgtaaaagtgttcctatttctccacatcctctccagcacctgttgtttcctgactttttaatgattgccattctaactggtgtgagatggtatctcattgtggttttgatttgcatttctctgatggccagtgatgatgagcattttttcatgtgttttttggctgcataaatgtcttcttttgagaagtgtctgttcatgtcctttgcccactttttgatggggttgtttgtttttttcttgtaaatttgttggagttcattgtagattctggatattagccctttgtcagatgagtaggttgcaaaaattttctcccattttgtaggttgcctgttcactctgatggtagtttcttttgctgtgcagaagctctttagtttaattaatcccatttgtcaattttgtcttttgttgccattgcttttggtgttttagacatgaagtccttgcccatgcctatgtcctgaatggtattgcctaggttttcttctagggtttttatggttttagatctaatgtttaagtctggtaccaaaacagagatatagatcaatggaacagaacagagccctcagaaataacgctgcatatctacaactatctgatctttgacaaacctgagaaaaacaagcaatggggaaaggattccctatttaataaatggtggtgggaaaactggctagccatatgtagaaagctgaaactggatcccttccttacaccttatacaaaaatcaattcaagatggattaaagacttgaacacaaatttcttacagaaacttcacagccactgtgtttcattgattacaataatgcaaagtgcatcaacgtcagaaaggtgcaccagaggctggcacggctgactagagaatggtgcttcctggctgtagaatctggtacctgatgtcatgctgtgaatgttagcaggctcagggtgcctggcagggagcagccgtgataagtggcttagcacaggggacccagcatgcagtttagggtcaggggactgtgtgtgagttccggctggattgctttcaagatctgtgctcctgtgcctctctgcatcctggtctcctcatctgtcaaaggaaggagtaacagcacacttgagggatgttgaggattcaagatgacgtgtgcatagttagcacagcactccagggttctatgagctctgttttaatggccatgttctcaggccctgtgttagactctgtgtgcctttaccccgtataagagccacaacagctggcagggctcaggaccaggaggaccagttggtggcagctggcatcaaagacatacagatgagttcaaactcaagtttctgtggattccaaagtctgctttggtttctttccacaaatcttatgctccttagagtttgaatgctgagaaagcatttggattttctaaattggtcacagtatggcagcttctctgagcgtccatgggacgtggcatcaatgtcctcttcctccacagattcccgtgctcctgaacctgagccacgaccctgaggttggcctgcccgcaccgccgctcatgtatgccctggccttcggtgcttgcctgggaggtaaggggctgctgactgcatgggggtgggggtgcacgcccacactgtggttcagcccaaagcaacagttagtgtgtatcagattaaaagcaaatgaaggagagtctggatgatttcctgagtggacacacatattcagctttgacagagcaattccagagcaactccgttccttcccattctctgcagagctgcccccgacttcccgggcccattgcctggggatgactggttctgatgcttcacagctaatgtgttcccgccgtgtgcctgtgtgggtcgtgcttaggtttagaaacagattttgaatcagaagccatcctcagttgcagttctctttctctcttaagcagtggagggacaaatgggtcagctagaaggggagactctaacccataagagtgggaagaaagattaaaggatgtttttggggtgggcattgcactttggagacagtgaggagtggattagagagagtgttgggagagactgacctctggtgagcagacacagggttgtggatgccgttgctgtggagagaacagcgggggagtccttctcacagctaagaagcctgatcacctttgggaacacagggggattgtgaagaatcttagatcaacacatcagatacgctttaagtttttattcttatatccaggtattcttagataatccagctttctttgttctttgattgatttctgactattaaatcaatacctctctggttagtttatctccttggctgaaaagggggattaatgtcattcagtgaagtttctgtaatgtcagcagccagctaattcatgtaagtcagtgactgatgcctcaagttcttccgagagtgtagaacttgttgaaattgagtgctgaaattgcccctaagaaccagtcccgggaaggcaatgcagagctacatttaacatcaacaataaggaacaggatccaaggacacctggaaatgcatcccctatgaggattctgttcatttgaacttgctgagcatctgctataccctgacattgtaacagacagtgaattcacccccctgctgtcgagtggggaggatggtcacctaaactaaggttacagcatagactgacacgtcctgtaacggtggtgtgccctgagtgcacagggccctgaggagagactggagacatcggaggaggttctgcagacagggaagtgtgaagccaggtcatacagagtgacaggcctcgtgagctagtttggatttccccaaaacatgtaggatcaatgtggaggagatttctctaggagagacatcaatgtgtgccatttataggctaattcctaaaataggattagacacttattaactgagcacactttggaagcagggatgcagcgaataatgaatgttttcagtcttgggagcgttttaatctagtagctctggcgattgaaaggcacctgttcctggcacggcaggagtgcagttgtgttgggagttaactctacacttattctctcaaggccctttctcgttgactcaagatttagcattttacagaaattatggtaaaatatgtgtaacctaaaatgtaccatcttaactgtgtgtaagtgcacagttcagtggcattagggacattcacagcgttgcgcagccgtcaccaccgtccatctgcagagctcttttcaccagcccaggctgaagctctttccccatgaaacaccaacttcccatcctccagggctggcattctgaggaacactttaaatagaagttttcatttggttttagaaatgtcatttgctctataaattggaggtgattcactggatactttgaaacaactttttttttttttaactggtctgaccccagtattttttggttgctcttttcatgaagagctaagaactattcaaataagccttcagaaaaacctgcctttgcctgagtttcctggaaagcagaggtggaggcaagtgcacgtgctaaggtgttactggcaggtgcaatcctaaggcagaaaacctgtgggaaggaagtgaagtgagcgtggagagtgaagaagtcttccctgctgcagttatctagaggctgtggtcaatccaggcagcatgtgactattttctcaacaactcaggcagcacgtggctgtgttcacaccaatccaggcagcatgtggctgtgttcacaccaatccaggcagcatgtggctgtgttcacaccaatccaggcagcatgtggctgtgttcacaccaacccaggcagcacgtggctgtgtttagatcaatccaggcagcacgtggctgtgttcacacccacccaggcagcatgtggctgtgttcagatcaatccagacagcacgtggctgtgttcacacccacccaggcagcacgtggctgtgttcacacaaacccaggcagcatgtggctgtgttcacaccaatccaggcagcatgtggctgtgttcacaccaatccaggcagcatgtggctgtgttcacaccaatccaggccacacgtggctgtgttcaaaccctaaggctgctgctttccttaggttatatccaggtcttgaaggactggtggctcttcaactcgacaaagggaatgtccatgcatagagttaatttatatgtgttctgtcaagtggaaaatctcactgttctgagagtgtggcctattgagtggaatgtatactgcagacacaggagttaccctggaggttcgattctttgtgtgcagcattcatcaaaaacagagccaggcatggttttgaaaatgcccttgttctgcctctggatccatgcattgtcttcccatgcaggatgacctgggtgtgccaggacaggcagggctgttcatgtgcaggcccgacccccctgtgcttctccgtcaatggaaactgggagggaggcttgagctggggaagtgacacctggggccttgttctccctaccacatggagcccatgccacgtggaatacccttaaaaccccactggtatcttattaaatgactgcaacatcgttggcatctgaataataggctcacattcttaatctcatgtgaaccccacaaccaccccaggagatgctggggaaggtggtgatggtcctcataaacacagaggaagcagactccctgcatttctgcccctgcccatgatagggagggatgggcagctgggtttctggtcctggccagggactggcatagggatgggcagaccaaagccatgtggaatccaggtgacatgagggaatgtcttctgtgggagagggaggagctctgataatgattttcctggccctgagaccaaacctcagaaaacataggggtcccgctccctcctctggccatggtcatgtctggatgcgtggtgaggagatgcctgcggcatctgcagcttgagtgtgggccggctctgtgtgttgctggcaggtggcagagcgcacaggtgcagggagcaggtcctgacggcgccacagagctctgctgtcgctgtgtctggacttgtgccacctgggactgcctgtccccaggaggtaaatgcttcctacggctaacaccggctggttttgcatcttcctttccctactatcacaaatacctcagttaatgtaacagaaatggtggcagatttgctcagcttacagagcttagaaggtttgagacttcaactgaggtcttctgaatttaaatatagcattccttctgttgcactggcggacacactttatttccaatacatctgtgcagaacctgccagggctgacccataacctccaggcctctctccggggcctctccagggcctcctttccggaggctcctctccgtggcctcctgtctttggcctcctctccagggcctcctctctgctttggtatcagccttgcttgtctcattttgctgaccaataagacaggaggggcctgtgtaggagcctatgccatagcctttgccttcgtcatcaaaatgtgttggtgccagttctcctccctgccctcctgtcttagatgtggctgggaagccatcctgtgaggggagggagaggccgagaacagtggagacctgcctgacagtagcaggcctagcaccagctccccgccctctgtctccaggcttctccttacaggggaggaggtggtcgcacacgtgtctaagtgctgttcatcaggtttctgttgcccgtaaagcattctttaaagaaacagggctctgtgcgacttaacgagttgatgtcctgcctcccaggctatgagtctgtgagaaggctgaaggacttctgcaaggggatggctgagaaggagggccctcagggagggaggccaggcaattcagacacatctggttgcaggagggcctctgggggagagcagcccctctggtgtcacccacacgacactcctgagaagatgggtggatgtctgatgtctgaaggctgagcagtcacccccatgacataagccagccctgcccttgcctgtcctcagccgcatctccctttccaaggaaagagctgtgctccccacttgccccccatcctcacccagccttcctcatgcaggccccaggcggtatgcagcccctcctccagatccttcaacatcctttcctcctccccattcctttccctgagtccagagtgctcaggaccaaaatagcctcctgagcagttcaccttggcaacctacaaaaggaaatggaaagatccttctgtttcctgggaagtggtccctcgcagatcaggaatccacgcccacagcagacagggtgaaatgctctccacctgggcaggacctgcctgcaaaactatcattttaattggaaaatgggcatttttttcaatcactaatccttaatgggagagaaaataagtggagtcttttattttcagcactcacgcaagttgctgactgtaaacttggaccatgggttgggctccactcatgatgtcctggagttagtagggtttagggtgcaggctgatgctgtcctggtacccaggtgcattcttggggctgagcagggcagggcctgctgaggaacatcggcttctttgtgggaagagacttgtcggacagtgagaaatgatggccacattagatggcttggcaagggtgtggagtctcactgggcaggtctcctggccagggaaggagtggggttggcaggcaggatgatgggatggaaccgttggtgcaacagtgcccagagggggctgtctgggccagcactgccccgaagactcgcatatcgcagctgctccaggcctttcagacactgcatggctgtctacagaaaggcctggggcagcctgagccccacctctcactgatcttcctttggagccagaatggttcacggtcaggacttgccacttcccgacctgacacctgggcacactgctcaccctgtctgtgctgtgtcttcatggggacgtggggcctccacctgctctgttattcatgttgtccagcctctgaaaggttgctccctcacactgacatgctgtaggcagctccagggcagtgttgcacagttcacccatcctccatagaaggagagagagatggagatggaaggcgactcttcctcaaccgtgtgtgcacggacatcaggactcagctaaactggctgagcccaaatcacgcgcctgttcgtgaacactgaccacgatggctgggagcgacggaggaggctcctgggccttccctgggtgtgagtgtgtgtggggggttggatctcatgacccaagtggccaccttggccctattgctcaccaggctgcgaggatggcacgcatgcatgtgtgcacggtcataaaagcttacccagagaggtgttttatgtcaaggagatgccattggtgaagacgtgaaggaaaggggttccacctggttgtttttacctatcctttcatccactgaaagagtttcctagtgtgtgggcctggagtccagaggaaggtggttcctgtctgagactgcattcctgagggacacacgttctgggctttggttgttggccccacttgtgtttttctctgaaagacacacagccccacagtgacttgcccattctccttagctttcctccactctgttaaatacaacagccatggtcttatccataaatgaatcatggtatttgtaatcagtgagcttattttttgcttgcttgcgtgtgtgtgtgtttccagatatttacaaagcggtcactttgactataaaataataatcaaatcaaagcctgtgagatgatctaaatattacaaaccaaagagaacagaagcttaccaccaagatgaactgggattttgtttttaaattttgactttaggtaacgggacactgattggcgcgtcggcaaacgtcgtgtgtgcagggattgcagaacagcatggatatgggttctccttcatggaatttttcaggtacttttaaattccctttaaattttctgttaaactgtctagttcctaagcttacttaattaaaaaaataacacattaaatgctaaaataagcatatttttagcaagtagagagactgtggtgtaggggagattagctcagaaaaaaacacattaaaaatttattgctggtggctcacgcctgtaatcctagcactttgggagggcgagacgggtggattgcctgagctcaggagtttgagaccagcctgggcaacatggtgaatccccaacatggtgaaaacacaaaaaaaattagctgggcatggcagcatgtacctgtaatcccagctactcaggaggctgaagcaggagaattgcttgaacccgggaggtggagctgagattgcaccactgcactccagcctgggtgacaagtgagactctgtctcaagaaaaaaaaaattgctgggattagctccataacacagaggatggttcagatatcctggatgactcaggttgagtcagggggccaggaaatgactgtgggcttgccagatatttcgtgtggctgtcctcttgaatattccagtgggagcttgtgccctgactgtccacgaagacggtgctggattgcacagtccctgctagcaaagaccccgtaatgttgcagactgaagccagggtggcggaatgggggcagcctggcagtggcgtccctctcttgtgtgggcacctctcaggaggactgtgcagagatgaggccctcggtgggggcgtccagcggatgcctgcagagtagagcctcctctaggaggagctgagtccgcgctggggccctgactgctgacacgtctgtgtgtgagtagcacactgcacattgcaaacaggtgagggggcagaatggaggctggaaacccctgtcaaatggtgctgttaaaatgaacttcatttatttggtgtcgagcaagtttcctgtggagttctttgtacatttgcacagggtgtatgcacaatgatggttctcagaaccagcctcgggtaaagatttggaacctcaactttggttgagtggcagagaaccctgtagccagtggagacagcgatccctgcaccaggcactgctgcctggggctggcttgggaacagaaccctggccatcatacccaggtgaggacccacacacagcaggctctttgaacactagcacgttggattttgccagacttattatattggccatttccatggttcgtaagaaactagtaatacctggtaattttgctgaggcattaatttgaatgacactcctgggtgacttgggtgtgagcctcaggggacgctgaatgtgcgtctcccggtgggactctgggcatatcgctgaccctgccgctaagggacagggttcagaacttaatgcctgacccagttctttctgtttggactctcatctgcctctgctgagcataaaagaaatcatcctgtcagttaaacaagaattaccttaatgagaacagcattgattacagcaaatatagcagtggcctttgcagggtggcctaccacacactgccatcttctcatctttgccctatggtcagtgagggtcagacccagagcacagccaagagaggggatcagagacaagtgtgctgagtgggcagcaggaagagattcagttcaccctctctaccagctctgcctccttcatttgggccgggctcctaacttctgcagccctggaaggccgtcgttctcacatcctccatctcctcttctttggttggccaagcatactatacactggctcctctactctctggcaacccataggctggatttcagagagcaaaaagcatggctttttgcaacaccagttggtctcacaagtaggcatgggaggcctggcattagtatttttttaaaaagaaggtttttagggcaaccccagtctgatcttttcccaagtagcactttggaataataaccagggcatctgcccaactgaaagggtttgcgtccactccacctgggacatgtaaagtgcctgaggttcagctccagtgggtgatgcatgtgggcactgaacttttcacatagttcttgcatttggtgtgcagtgtgtgacacacctatgcgtgtgtgtgtgtgcgtgtgtgcagttactgtggtgaacagctagtatgacaggaagtcggtggcctcagaaagcttgggcaagactgccagttgtctccttgaaagctcattagtcccagccttatgaatcacatgcatcttcttggatggagagtgtgtccttgtggtgagtggtcaacagagttccttccttgtttttgcctggttccagttcttccagctctgaccatccttcttgccaggtccttgctgtgcagaaatcagagcagtttttgcccagggaatggttatctaattgtagtagggcctttatttgcatgaatttcttaatttgcaattgcacatgcactgatttgacttttatctaactcaaagatttattttcacaaaagggggcttcctgtgatacacattgcagaatgttttaaagaattaccatttctctcatgatgtagataagtatttaatggaaaatatgtaaacgaataaaatacaaaagtaacctataattttgctacctagaaatagccactgatcgtaatttggtgtgttttcttacatttttcctgcctaccatagattacatattttttacaaagcctttgaatcacattgtgtcctaccttttatactttatactctattgtgagcatcttaacaagacataaattgtccttccaaaatagaatagctatgcctccaacaggcagatgtatcctggtttattttacattgaggcattgaggttgcttgctgtttcttgttatggtgtgataaatatctttatagataaaaccttgtttcatttctgataattgaagataaattttctgacatagaaccgctggttaaatgagtgatgttttaagaatccagataaatattgacaagctggcatccagaaatgttgctctccacgcattttattgaacttcactgctgaaactcgtcactgccatttgaaatgctcaaggttcatctggctggctaacaatagactcatgttttgttttaattaattctactgagattatactctttctgtataaacactgaatatttgcatttcttattttgtaaactttctattcatatcctttgccttcgtctttctcttgagagatgaattttcctatttttcagaagctctcttgcatctacagaaatcagttctgatatatatgttgtgactatttttaagcttatttttgtattttaaatttggcaaaggaattttagatattctatagtcaaaatggataaactttagctccatttttatctatactttttgctttcattaattttttaaaactttttctttcaagataattgtagattcatgtgcagttgtaagaaataattcagagagattctgtgagccctttgtgcagaaacccctggtagtaaaatcttgacaaactatagtagaagatcatagccaggatgctgccattgatgcagtcaaggcacagaagagttccattgctacaaggcacccttatgctggccttttccagccagctctgcatccctcccacctctacccctgccccaatctcttctccatctctaacattttgtcattgcaagaatgctacataaatggaatcatacaacatgtgacctttttgtattggctgttttcactcggcatcattgtctagcaattcatccaaattgtttcacatgccagtatttgatttctttgcattgcactccatggtatggatggaccacagtttgtttagtcatctcctcactgaagaacacctgacttgtttccagtttggggctcttacgaataaagcagataggacattttctcccagtctgtagactgttcatccacttaacaggttcttatacaaatcaaaagttttgaatcttaatgaggcccaatgtgtcaaaaaaatttttaatgtgttgtgtttttggtgtcaaaagcatgacaacaggagacctttttgcctagccctagatgtttttcaaagattatctcctatgccctttttttctcccaggttttactgatttacatgttacatttacgttcatgttccattttgagttaagtttcatataaggtgtgaggtttagatcaaggttttattttcttttatttttgcatatggatatcactgcactctagcaccgtttggtgcaatggctatggttcctccgttgagttgctgttgcagctgtcactcatcagctgagtgcatctttgtggatctgttcctgggttctctgttctggtgtattgatctggatggctgtccctccccagtagtgcactgtcttgattactggagctatgagagacaacatactggattacacttttattaggatcagaaatattggaatagacacataatttaaaattaccctaaaaatactggtatcgagaggtctgcaaatattttcttagaattatttttaaattttgtctgttttggtggttatttcccccttgtcatttcttatctgtggatttgtttttgattagtggcttgtgattcatctagttctgttttatttttcaaaaaataagactttgatgtatttcttaggtctagttttctgttttctgccttgttcattgctgcatttttctttatcattcccttcctagtgctttctcttggtttactttgctgttctttagttttttcaaatttcaaatttatttcatttatttttatttgtttgttttatttgccataagtgtttaaggctaagctctttcctccgaacactgctttaaatgtattccatggagtttaatatataatgcttccattgtcattatttctaggatttctgtattttcagtgtggctttcctttcatctgaattggatgtttaataacagttcttctcaatttccagtttgaagaatctttttatttattttattaatttctattttgatggaacttacctctggtttctttgtgaccaaatttgatcatattttatgtgtgcattctctgttgttattgtataaacttacatatttctcaaatctacccaatgattatactaggtcatttatatccttacttattttttgtccactaaatctgtcatgtactttaagtggcatgttaagtatttcctgttacaagtgtgtctctttatttcttccttgaatctcttactatttatctttgaaaggtggttactatgttatttggtggatacatatttatcactgttctgtctctactgtgagtcggaggcttttagcactattaaacatcccctctgtcatgcttaatgctctttgacttgattgtactttattcagtattggaatcacaaatcacttgctcagcttttagcctttctaaatcactttgttttaggtgtgtctcatatagactgttgggacttgctttgtgaatcaaaataaaagtattgttttcttttaataaatgaacttagtccactcacatttattgatatgactcacacattttccatattataggttttatgtatattttagttgctgtgtttctctatgtgtatatcttttttgctctcttattttctaaaatgtttctttgcaatttgaaagatttgtattttgatctagtgattacctttgttcttatgctttttcacttgcctttagtcttctgttttcttacgtagtcttttataccttgtttgtctatctttaatgataacctttgacttctacctcttgcctaaatgaccactgataagtttattctacagtacttttctcttcccttctttctccacgcacttactaattgaagtatttctgctttcaaaacatataacatcattcattttttcctccaccccccattgttctatgcttgtttctcttagatccgtgattaagtttattggatgctcaccattggcccttttgctgaagtgttcctgccttttgacaggtgaagctaatctttgagagcccaagatcagctcctgggtacagtacccctgagctttcgtaggtttaaagctgcgttctacatccttaacatttgacaagacactttgcttcctaatacacccttggttcacacgtaccttctctgggtttcatgaaggtgttactccattgtggcctcagctgtatgtgtgtgtgggatgtgtgatggcagccccgttctcttacatttgaagttatttgatcattttgctacaggcttggagggttttacaaatttatcttcagagtctaatagttttactaagatattcctaggtatcccttgggtatccatgggcctaacatgtagcattgtatcttcttttgagtccagaaaggtttcttggatcagagttttgagtatttgttatattttacgatttcacggatctctttatgttgagtctcactggcctggcttccatttcaaccactttctttctggcttgtttttactactcagctgtttttggcctcctgtttgccttctttctttaatgcccctgattacattttcatttgattatagtcttcctggaacaccttataatttaatcttcatttcttacatgatttggtgtttttctttggcttttcattttagtcttcatggttttgtcgttttctgctctcagcatttgggttttggattcaggttgtttttgcacagcccccagtgcttatctgagggtatggaattcagtatagagtgttgtatgtggttttgtgtttcctggtttacatgtggcttgttggggaaatctttaccagcttccgtatttagattctcatgctctgttttattattaggaaagccttgcacggggcagtcagctttcggctatgtacttgtggacagggtggccagccggagtcagttccagggttcctaatttgaggagattcctattctttggtcagtgtggtggagagcagtctctgtaacagctttttttcttttttttttttttttcagtcgtggggcatttccattcatttttggttccttttgtcttacaggattctgcatttccccccctgccctcactgtttttccccttcccctgccaggctttgatgggcacgcctgcctgcctgtttgctgtcttctcttgcgggtgatgcatgcctgcctgtcacctggagcccagtgtatgtcaatgtcttttctccgtagtctatacacaaatccaccaggatcgttttccagtggttttatgcttaggttggccttcctacttctggctgttactttcctcaattttagaatttttatttctttcttctctttttcatgaaaattatctggatttctctggctccttgcaagggtgtggggcaggggcctgagagatagcttggctgggaattggtgttttcttctttactgccaagtaataatgtggagtttatggtgctctccatcttctagttatgtcgaaaggcaggctgcccacgtagcttaacctacatttcttgttgatctgtggagtttattgtgagcagatgcagtgatgtggcattgggtggctgtcagtaccttgcctaccagaagcaagacagtggcatcgctaatccacagtccagaactcgttctttctgccatgcccaaggaatcttatttgcggcacttcctagggaggatatgattttatttgctccattggagaaaatgattttctgactagagattatgctaatgttagattccctcactgggcagaaacatggtctgcaggacattcctccatggggaccagggcataccgtttcagtgccacccacgtaagatacaccagtcaattaaagagtgtctcactaattgataatgctgatttatactatttctttaaacatagagacacattaagttgaattttattgtggaatttagcttccagtaaagcttttgtcacctcattttgttttcttttgtggtttcttagaacatagctaattattgtgaggctttaaaaacatcaagttaataaattaaatgaaaaagtgaaaaaaatatctagagaataaaccatctagaaaatactgtattcgaagcaatatttgaaaatgacctggctttgttcagtgtgattcaaagggatcattaccattgactaacagtaaacataataaaattctttgtagatttataaagccctcattctgtctgctgcttcaagggtagccaggcagacattcatattttctcaaaggtcaaaacagttgctaatgtaatattgggtgccttttcaaaggttaatctctgtattgatcacagtgctgtaaactcactgaaccaaagtcaaatactttcttttcccctgagggttaaaaatcatgaatgtgagatcaatattttctgaacgtaaatttcaaagttagtctcatccacatgttatatttgctaaagaagaaagaaagaaaggaaagaaggaaggaaagagaagaaagaaaagacaagacaagaaaagaaagagaaaaacaggctatttttcttgcagctctcatctggttagagcagaaatgggccttaggcttctcaaagcaggctgatcctccgtgtctgaaggaaaacttaaagccactcaccccctgcccttttccctcccttaatgtaaactcaaagaacctctcctgttggtttgcacctcgacgtaaaatcttcagccttaggataatgccatgtgggtagatttgtatattgaacccttctaatcagtggccctgagaaaggttacaatgagtggggcaggagctgagagctaggagcatcgcagggctgtctgaggctcctgaaggccagagagtcctggacagtctgagagagccacgagagccgtaaatacttgtcaggagggtgtcaggagagctggtgcagaagaggttctagttaaccatgtagtgattttgttattcaaaatggctccactttgattcggggtgaccaccccccctccactgtatacttttcaggaagcaatgccccacaacctcagtactgggagaggcacgcagaccactaggggagaatgggaggatggcacagagcccaagagagaagatcgacccagcacactgttactgaggtgctggagaatgagggcctcacactgacgggggtgatgatgagaggccaacgccattgcatatcattgccaggagcctgagaacagggcctgcgcctgaggcaccagagccaaggggaaggccctggtaaagtcacctgtcccactcactatggctgcctaacaagtcatcccaaaatgcagggacttaaagcaacagtgacgatttcacgcctaactctaccatcttcatggaatttgaaagggcagctggtactattccactggggatcaccagagctggcagaggccaaggccagaatcatctggaggctgctcacttatgtctcctgtccaggttgtgggggcccaaagagcactgctgggatggcggtgggggcctcagacttctccctgcatcacaggccctagaaacaggggaaggagcttcttgatgggaacgtgcgctgtcagggctgtgggataaatcatgtgggatggaatatattagtgctggcgaatttgggaaatgcaacctgccgcatcattttatttgcccaagacttgtaatccatatgatctcataattgcattttgctttagccattctgggttgggttttctgtcacttgtagctgtaagagccctaagtggtacaaaggcccaaagaaatgtgctgcccttcttgatctttctcaaggactcatgttaactgcagtcgctgcagcagcaagtgttggatcatagactgatctttgctttctgcatcccattacgtccggaaggcccaagttcctattgtggaggctgtatcaagagccaggcctccttgctgctgaatgtcctaggtctgagatgagcgtggtgcattgtcccgttggcttagcttgtggttcacttatcagcagttaggagatggcgcttgtcaacatgaggagcaggtgcctgtgcagcacctcgtgtttaccgcggctgagtccccagccttgacaggagccactagttaccatggaaggtgggtgacaggcgctgacttagcaacattctgcaagcaccagcaagtggctttttctactccttactccagctgatcctttaattctccaacaccaagtaggtatcccacaattcaattcagttctaataccaattacccggagctattgtcagagcacaggctaagggctccatccctcatcagtgccctcaattcagacacagctatcagtcacaggtatcaggcactcacacttctgtgcaacttggctacaaatcagggttcctgcaacccctcacctcaggttcaatagttcgctgcaatgactcagagaactcaggaaagcatgttacctacctttactacttattttaaagggtattataaagggttcaaatgaaaagccagatgaggaagtgcataggtgaggtctctggcagggtcccaagtgcaggaacttctgtccccatggagtgcagatgcaccaccctcctgacacatgaattcgttcaccaacatggaggatcccagaactccactgcttagggggtttgaggcttcattacattggcatgattgattacatcattggccatttgtgattggctcaatctccagccctggttctctccctgaggattggtgtggggacggatggtggagctgtcagttttaactttctaatcatgccttgatctttctggcaaccagtcccctcctgaagccatctagggcccccaagagctgcctcattacaacaaaaggaattcctgtcactcttatcactcaggaaatgccaaaggttttaggagctctgtgctaggaatggggacaaagaccgaatatttttattcttctaccatcactagtcaaagggccctcgaggtgcctgcgttgcttgatggtgggtcaatggggtgtttacggatgaaggcacagttgcgtgcagagatcctccatggatgctggggtgagatctccggagaagccattcactgtcagtgtttctttatacgcttagactataaagttgaaaaatgatgctatagagtcgtctaaggggaaatttctctctgcctttccacggatcaaatttcctataactgggaagaaatccattggaaccacttgtggcctaaatgattgcttttatgtaacttgtttttggtatattattaatttaatggcagagaatccttaatttcaaccattagggaacccagaaaaaaataagtacattaaaataatgtaaaacgacttaaaaagccttaaagcgacttcaaagacttagaaggactaaagagtaaatgtcctggtaaagtgcagtaagctgcagtggggtcaggagagtcccaagacatctttagtcttcttctaaaacaatctcagcaaacaaggtgcttatctcataacctccagacaacataaacaatggagtgcagctccgcatttatggatgacccaaatgtggccagctccacatgtgtactgtcacgatagcatattgattggctaaatttttgaagtaaaggaagcttggcctaaactttcctctataggatatgctattttgaaaaacaataagataaaactttttttataatgcatttagacatgctgacacagatggacatttctttacaaggttgtatatttaggggtaactaaagaatttatcaggctgggtatgatggctcatgcctgtagtcccaaaactttgggaggctgaggcgggcagatcatgtgaggtcaggagttcgagaccagccttgccaacatggtgaagccccgtctctactaaaaatacaaaaaaatcagctgggcgtggtggcatatgcctgtactcccagctactgggggaggctgaggcagaagaatcacttgaacccgggaaacagagggtgcagtgacccgagatcgtgctgctgcactccagcctaggcgaccaaaaaaaaaaaaaaaaatcagatatttaatccggccatatttcatgaatagtcagtgtattaaaatgtttgttcttttatagtcatccatgaagtcaacacagctttgtaactagcaagaagtaggcctcagtggcgcagtgatgaagcaggcagatactgtgtgctgaacttggagactcaccagggaggagcagcaaacacagctaaacgtagaccccataagccatccccagtgtgggtcagtggtactgtgctaacggcactgaggttcccagatggcaaacagccctgagcaggtgagctgtgtgacttccccaaggaggagaaacagccagcatccctgatggccgggcaagaggatggcgctgaagatggtggaaggcacccgggggagggagactgtagatgggcaaaaaggctggatttcactccaggtggtgggagtgcagggaagggctttaagcaggaaagcttgcaatgcgatttttcttttacaaagcccattcttccctgcagtggaatggacaggttagaggaggaccgagtggccccggggaggccaggttagagcctgaggcttggggccagtgtgtgcagggcaggtggggaaagggggccagtggggtagggtttggaggtggacaacgtggatgtgagccatgaggggatgaaaactcaaaggcacatcaggtgcaggcgcagtttagaggagaaatgcagagtttggtcttgagtatgttccagtccgcagttggtgaggctgcatgagggacgttggattggcaggcgagtgtgcaagcatagaggtctggcaggagtctctgacggagcagggggtggtgaatgctcagggagagaaggcgcctgagcacggggggctggagacggcctcgggagcgggcactggacgtcagcctgggtgctatctatggggataaagaggagaaggatgcagacaccctgctggggctcttggctgcaggtgacagatgcctcaatcaaattcgcttgggtggaaagggacatggaccagagggttcagcagcctggatgggcagtgtctagctgggcctcggaggcaacaggagccaggctgtgctctctccacctctcatctctgcctctccctgcatgggaattccttccagtgatagagaacggctgcaggcagctccggagacagacccagacacgctccctctggaagggctctggctggtctgagctgggtgcccactcttggctggcagaacaggccttgactgtcacagtgtgaatctagcccagtgcctaggccagtcaccatggcaccacgtccggtgtgtggcacaggaatgcctcccaggaggagagggctgaaaacaatcgggttacgtgcgcggcaggtccgcagagggtggggtagtctgtgcctgctcagcgctgtcgacgcctttgctctgtgttccctggaaatttccgaaatgcagctactttgctggagctccattactgagctttattccaggggcgagcctggactcactggactcagaccgattttttttttttttttttttttgagacggagtctcgctctgtcaccaggctggagtgcagtggcacaatctcggctcgctgcaacctcggactccctggttcaagcgattctcctgcctcagcctccagagtaggtgggattacaggcacgtgccaccacagccagctaatttttatatttttagtagagatgagttttcaccgtgttggccaggatggtctccatctcctgacctcgtggtccgcctgccttggcctcccaaagtgctgaaattacaggcgtgagctcagacccattttattgcatttttatatctatacttataagtaaaattggctacagcttttatttttgtcttatagttgagtttgaaggttctgtagctccatcaaatgaattggggaactttctatatgtatgtaacttggagcagggaaattatagccccatttgaatctgacatcttcttaactgggagattgttaaccagtcttccagtctcctcactggctattgaatttgtcaggtttcctgttttctgcatggatcagttttagttatttatattttgctatgaaatgacttgaagcttttcacttgtccttgtatctgtgatcaaatctcccctctcagttgatatacacacagtcgcacacacatacacacacattctttttcccttagtgaaacttcccagaagttgatatttgtattagaaatttcagaaaagagacttttggccttttactctttatgtaatttgttattgactttttaactatatcactttcagttttttattccaattcatccttcttatctttaaataatatttgtactccttttctatcctattattttaagtatttaatttatttattttcagctttttaaaagtgaacatttggaatctcatccattttgatttggaatgcatgcttatgtatggtgcgacatggatgcagctcacctataaaacatgggtctccagctctcccaaagctcttcattactacgtttgacttcatctcactgacttcacaaaccacctttatgatgaaaaaatcctcgtggggttttgagtatgttggtgggccatctgttgtgttttgtggggtcagtgacataccatcatgtttaaattatttggactttataagcttactctgtggtagggcaagtactttgccttatcagtgtttttctgactgttcttatttatatttttatatgaattacagaatcatatcatttcaattaattaaaaagccaattattattttgattgggattgtaataaaccttaaaataacatcaagagaattaacatctttataatatctttgctttatagtattctttgcttatgagagaaaaatgcatttgccagttgaaatagtgtgtgatagtcctagagggtatcagctattttcagtaagacagtcttttatattaaaatagctgcaactggattccataatctactttttccaggcactatctatcttctgcaccagccaaagtggcgaatcaggtaaggatgtgacaggcaagttctccagtgcttcctctctgtagattagcgatgctgagggaagatgctgattgaggttgacttcccaatttcagtacggatgctagggatcccagtacaggcacaaaggccatgttggccacagccacagctcacacctcccatcctactcctggaaactccatgttgctgttgtggatgctgaagccagcccccttggcagtgtgtctgtggcccttgtcactgcatatctagtgctacaagttctaggcaggtgaagagttgaatggacaaagcctagaccatgtattctgctttaggtgcaaggaagtctagaaagtaagtgtcttatgcttcaaattctaggtgaggtgtggttgactcccaccaggtccttaggtgtatgctctgtgtccttgcatttctgaaagtatctttcatttgttctgatcactctatctatctatctatctatctatctatctatctatcatctatcttctatctcttgtctctatcaatcatctctcatctagctgtctgtcacctatctatctatatctactcatttagcatctatccatcagctatcatctatctgtcatctactctaaagccacttctgcccttgttgtaggtcgattttattctttcttcaagtcagtggaagctgtccgttcacatccgaatcctggtttttccttggctactgcctccccaagtgtgagctgctgtttctcttggcctgctcccagcttcgagtcctgttagaagtcacatcagcaggatgtcttcaggacagtgctcagctagcagccagggtggcccctttctctgacttttctgtctcagcggctcttctagcacgcttgagagggcggcagagccccagcatttggcctttgctctgacttcatgccacggagagccaggtcttcttcctgaagcgtgcaaccccagactgacccttcaggagctcccagaccctatcacttgccaccggtttaccccaagccacatcttcccagacctggaataggagtttgtcccagataagtaatcaccatgttttctacaatcatagttggtggatatttttcataatacagattttcggaggttgggtcagcttgaaaaacctgtgatttttactgtatttgtctcggccatgggactctctagctacactcaacaggacctcaagaacttacaaagaacagctgagagtttgaggcaaaaattgaatttctctgtaaatttttcctctgcctctttccaaaatgctctgcaaaactctgaacataaaagtgaggagtgcacaggtatgcctcgctgttcccagggcagctgctttttgagtgaggacccatgaggagcccctgccctcagaggggagccccacagtagctagggatgccggcactgagcagtcagtccctagcccgcatcctttggagagtttggattacagtggaaatctccttgggaacattggtactataagtccccgacagggacagctggccaagagcgagcccttccaaagagggcgacttcagcactgggaggaaggccgggaatggagtgggagctggcagggggtaggggttcgggaggtaggaatcagggcagacagggccctggcgccaatgcagggttgaaaattaggtgctccaacctcacttcacctgtactcaagttaattttctactctgccattcacaagaacgatatgaaatgcctaagaaaaaatcgtcacaagatgaagctggaaaaatctatttataattatagaatttaccataaaagtagtgccttgtgctatagatcgtcttatccagtgaccttatttcaagtgtcttcgtttctatatataaagagattatgaaaaacctgtcagtttgtaaaaagcaaaaacatggatggaaaataattttcagaaattcgaatttacatttttaaagataatttactttcttcctgattaaaacaacaacagtatgattatgcttattttaaatacgtctatattcagctctcacaatcttttaatattgcatgagttttccactaagcttaaaataaaatatcccccttttccagaatgtaaattattttgtttctgccttctagtaagctggacatttcaggcaaacccacagcatcatgatggtttctgttgtatttttctcaacctaatgtgtttttttttttccttaaatgactcatgagaattacaaggaacaaataaaatacccaatagtatgatgacttgcacattggatttggctggtgtgctaattgcactccccagctccgtcggcactctgtggaaggtggtgttgtcctaaatttgcttttcctatattaaacccggaattacctgagcaccaggctcttccttccagaactcagcttaatcctaagctttgagagttaattttatggtgcttgccgttcagcttgtttccctcatttaaatcagatgttgatttcccagtcctggctgtcagcccctctcgcgttgtgtgactcctgcatgactcgatgctttccatttcttggtttgtgtaattgtcagatgtgccggcttcctgtcttgttatatgtttcatatccgtggagaatgaagctgagtttaatagactgatgaaaacatcgtgggatctcactctaaggcgaacgtttgtgagaggctgcttactgtctcacgctggtggctctgtatggattgctgagccccacagggcaggctgctccactcaagggaagggcatcttgccgggagaccatgcggagggcaggaagctgcccagtgaggatggtgctgagttctcctgtaggatgttaagggaagaatcacaaaatgagggttttgtgctttcaaataagtttgggaagtatttgttacgcaaggctaaataccttcttggtgcaaagcacccagtcccgcactccggtgtttaatagctagtgtgcctcaggcatcatgcagtggggagtctcgatgccttaggccgctggggttcatctggatggcctcatctgcccactggccttgccacccccatttgcaaggtaatatctacagagttgtgggccagcctgagtttctttcctgggaatgtggagctgggcctgaagaatctggatccagccacagaggaggcatgaacgcaggagtcggtgtgctaagagtcaccacatgctgagaaaggataggtcagcagtgcagggagctggggaaaggagggggaggcagtgtccaggcctgggttccgtctacacagagcaccagttgcatccctgacatggcacagttggctgtgggagtgtagtggttgagggccgtgcctctgcgcttgaagcttgaaccctagtcctactgtttactgctgtgtgtgtgtgtgtgtgtgtgtgggaagttccttgacttctctgtgccttgtaaaatgagactgcaatcaactgctgcctcataatactgttacaggcatggaatgcagtaactttcatttaggtaaaagcactcagaaaactgcctgatacacaactctgcaccttccctaacagggcgcctggggaagtttccactgtctcccagaacactgtgccgggcaaagggcaggccattgcttaccattttggtggactgtagcccagtttcctatggacctatgtaaaaaagctcctaatggtggctcatgggtagtccttgtatttacttgctcagttctagctggcattctctgcaatcttctcagctctcacacccagtcaatagtctggaattgagaagctgaaaatcattttatttccttagatatgatctaatttagaaggagaatctattgcacaaattcagatagtgcactgtgaagctaaagtagaaatggttcctcattatctccctggtccttttggtcctggccggctgccttccatggggactggggcatagtgggctgggcactggcatggggccaatcactgcgggagctggacacttccgggaggagctgcgaggagcctcagaggaagaaatgggagcaaactgatgtcaaaggtggggttgggagaaccaaaggtagccccatggaggccggggacatcaccctaaaatgcctggttggcgtctgtcctgtgcgaacttctcaggttccctggactctgctcacggtcaagtccgcagtagcctgtgacccacaccatcactccacctcctttcctagggggcagcttggcccaggcgcccaggctggccaggaaccctctccccgccactcccagccgggccgcttccctgcctccctcagtgctcctcagtcctgaagactttcaggacctcctgcctaaggttccttctgtgttccagcaggggcaagcatttctgctgtccctgctgagttgaaatggcttgtctacaaggggggagcccttcaggatggaaactgtgtctacgtgtgcttcctgacgcgtgggcttgggcacacagcagcacacaacaggtacctgctgggcctggcagctctggggcgggagggcaggtgcacagcgggctgccctcctccgtgtgggccacgtggctggaggaggccggctgtccttggagagtcaactcaccaagcaatcacttttcaattaagagcatcacccaaagccattttttaattgtgtctaatgtgataattttgtcatgtaatgataatgtaacgattgcccattattcaagtcacagatcagaccttaattaaaactgctaagttcctaattaattcccaacaaggccattcatgagtgtggagaaaaagcattatcttggcagatggagatttttgtgcctatgccccctgtgactagcagggtttgtaggtgaactgaccaagcaaccccaagctgaattcactgttggcatccacggaggcctgtcttcggcagagggacggggaacagcacccttccacaggccttacgtgtgtgcacacctgagtcgtgtgcgaggcaggcttcaaaaaaagtttgttgccttttaggcgagtgtgctgcgtgcagagcagagctagcagctggccggagatgtggccttagacaggctggtccttagaactggtcttttgacaacctaattttttacatatatatattatattatatatatatatatatatagagagagagagagagagagagagaaattgtatttattcaaaagaaattaggttttgccagtttaatttcacataagtgcctgcccctctgttttaattattttctccctttatatcagcagatctccttttacttccttaaacttgatgcccttgatcattatctcttattttgtgcatcatgtcataggctgcatactttctttctttctttccttctttcttttgtttttttgagacagagtttcacagttgttgcccaggcaggagtgcaatggcaccatctcagctcactgcaacctctgcctcccaggttcaagcaattctcctgcctcagcctcccaagtagctgggattacaggcacctgccaccatgcccagctaatttttgtatttttagtagagatggagttttgccatgttagccaggctggtctcaaattcctgacctcaggtgatccactggcctcagcctcccaaagtgttgggattacaggcatgagccaccgcgcctggccaaaggctgcatagggctttatagcactttaaagttaacaaatattttaagattttatgatgcatttcgatagtagaacagctaggttccccctgagcttgcaaagtttgagaagtgtgtgtagattgctatttgtagtcttaagctactgatgagcttcatatataattcacattcttatatgctttaagctccttagtattgcaatgtaaatcattttgttgcttcaaaatgctctttaaatgagcattttgattagaaaataagtcaacattgcattttatttttattgttgcagctacatgactaatttattgaaagtttcaaagacaattagcagtgctgtgagctaatatggaatttagagttttttcggggagggagagagtgttaattttgctaattgaataagttgtttctcagtaccatttatcagtcatttagattgtatctagaagatactaaaataactaattgaaaatgtaaaaaaactcagttaaaatgtttttgatttcttttgctttatgattaagtttccctgtgtcagctggttgttttagcatgaggtaaacatggcattaaatcaaattttatctaagcagatttattatttcgggaaaatcttatttattatttgggaaaaattaaataactgcagttataacagcaaataacataatcactataatcggcatatgacttatttatacaaatccgtgacctatctttcttcctccctccattctttccttccttccctctttcttcttcattagcatataagtaaaacaatgcttgaggacttagatgagcagaggtcaagaactctaataaaactctaataattagcacagtgtagtcttagtgcaaagacagaaaaaccagtgggaaagaatggagagcccagaaacaggctcaaacgtataaggctctccgatttatgacagaggtaacactacaattcagtatcaacgaattttattttgaatatacggcaccatgccaattggcacccatgtgaaagaaaatgtacctttatccctacctcattccgtacacacagatcatttctatatggaccgtagatctaaatgtgaaaagcaaaatgtaatattagtgaactcacgataggacaacatttgataaacaggaccccaaaagcactgaagagtaaaggataaaacaagatcagactatatttaagaccttttggtcatcaaaagttaccattaagggcctgaaaaaacaatttaccaagtgggagaagatttttacagtatgtattccagtaaaggattcatagtgacaccatggaaagagctcctaccaatcaattaggaaaaaccccagaccaccccatagaaaaatgagcaatttcactctcatttcactagaagaggatacccagtagacagtaataatatgaaaagatgcggaacttccttagctacagggaaattcaaattaaaaccacagcgccattttacaccatgcctatctggatgatgaaattgaaaaagatgaaaagaagcaaacattggtaaggacatgaaacaatggaatatatacactgctagtggaaatgtaaattacttctaccacctgaaagattcatttgcatgaaccctcagtctcactcttaggcgagccccaacagaaatgccactctgttttcacttaagaatgtactagagtgttcatagcagcagtaaaaattagatatacaatatatagcagcatggaagattctcaagaacataatattgagtgaaagaagccagacacaaaaaagtgcatatatgattttaattacataaagtacaaatataggaaaactgatctgtgctgttagaaaataggatagtgattcctcttggggagtgtgagaattaggggactcatgaggggactctgggttctagtgatattatattttatgacacacgtgctcagcttgtagtaatccattgatgtacaggtatgataggtgcattttttctctttttgtatttattctctattcagggattgactgcctatgggctgctcacttgtttctgtgactgaagttttattggaacacagatatgcttattaagtgatgtattatccatagctactttcatgctataacagagagttaagttgccagatccatggtacttcaaaatatgcaaaaagattttgttaagacacagacaaggaggtagagtactgcaaatgtaaaagtgtgtgtgcatatgcgagcatgtgtattgggtgtgtatgtgcctatgtgcctgtgtatgtgtgtagtgtgcatgggtgcatatagacaaatgtgcctgtatgtatgcgagcttatatgtatgcatgtatgagtgtgcctgcatgtgtattatgtgtgtatgtgtgcatgtgtgggtgaatacacgtatgcatgtgagcctgtgtctgtgtgcacacttgtgtgcaagtgtgcacacatgtatgtgtactagtgtggatgcacacacgtgtggcccatgtctgcatgattgtgtgtgtgtgaatgtgtgcatgtatgtgtgcatgtgtgaattatgatttggtgtgtacacatgtatacctgtgtgggtgtgcgtgcatatgcatagttgtgcctgcatgtgtgcatccatgtgttttcatgttcacacgtgtatatgttcatgtatgtgcccatgtgggtgtaaatgtaatatgtgtgtgtgttttatgtgtgtgttgttccaactgaagattgtcagtgaaatttctcttttgtcttatacaagtacttgcctgaattaacatttcaggggtagcagcagaattaccagaaaatgaattaattagtcttactcactgtgggtaaaataaccatcttaagagtgtgcataacctctctaatacaaaacaaacaaatggaaactggtgcttttctcgtgttgttatgggctttggaaatcatagcctctgaaaggaatttagcattttaaaaataataatttacagaatatctaagacattgaggcatcaatgtctcaatgtctcacttgagacattgttttggaatattgttttctttctggtagagggagggcgcctgcacctccctccaaggagaacagtgtgtatctctctcttgtgctgcccgacctggcaacccaggacagaatactcacatgccatcttgatgacaaatattatagcccttgaaatgtttagtaggtggttaatcccaaaggcaaattgccacttacagtctgtaaccaggaagaatagtagaatactgagaaattattcttctgcgttattatttacacatctaagccatttactttttcagctcataggccctacttgaggccgtttttgaataaaaataaagtgttgaccgcttttctaattaactaaggtgcacactttatttagatttccttaattcttccttgatatccttttctgttccaggaccccatcggggaccccacttcccattttgtcatcatatctcccaagtcccttcttagctgtgacagtttctcagtctttccttgtttttgatgaccttgacagttttgaggtctatcggtcatgtgtcttgtaggatggcactaaagtgagatttgtctgacatttttctcacgatttgaccagggttgtggatctgggggagaatgagtgcagagctgaagtgtcattttcatcataccctgtggagagtgcgtgctgtcagcatgactcatcatgggctgaagtagtgtttgtcgggtgtctttactgcagagttcctctccccacttctgtactgtgctggtgggagggaagttgccacgagcaagcaacacttaacgggtagggagctttgctccccgctcgaggaggaagtatctttagaagatagttgggattcttgtacatacatgtgtttatgcttctccaatcatttacttattcagtcattcatttatatcagtttggactctcatatatttattttgtgctttgagttataatccaatattgctttatttcttactcaacttcttcccagttgtggccattgggagcgctctccattggtgcctgtgtcccattgatgtgtgccgctaacatcgtgcttgtttttctttccgtgagcccttccttattttagagcactgcgatatgttccacgctcatcttatatacttcctgctccagtcctagaatacaacgtttctccaagaagccttgttctcttttactggagactggtattataagccaagatctgggatctaggtgtgctcattgatactgaatgtcattcattctacatgctctcagctgattgatagagcacagaaatatatgtgtatatactagtttgtatacacacacacacatttatatacattggtctatgaatagttctaattaaaccatctatttctaggttaagccaagtccatatcattaccacatggataattctagcctccaccccttgcacatgtgtaatctccctctccaacagggagaaacctaattcccatcatccaccatctgtttacttaatcattcacttccagtactatgtatatcagtttcagaattcttaattggcattctcgtgggaaatgccttcagcgtccacagtatagtgagcttgtacagttacttctcccttggagatggatgaggcagtgggggaccttgactactgtaaccctgctctgaagttgtcccctgcctcctgtgacatgttatgtgactgctcccttctcctagacatcgttgtttgacatctgtctctgtatgatattttctgcttactgcgcaggccattgccttccttctgcttctatttctgctgctttgacttgttgaatggtgactggctggttcacagaggattgagcaccttctcttgggtgtatgttccttagttggtcctcacagcagccttataaagtaggtattattaaccatattgaacagctgaggaaacagaatgattctcattttattttacaaaagtatttcagtagtctctgtcaggagttttaccctatttgtaagctagtaagtggcaaagtgtcatggatgctgacaagagacatgagcctcaggactttgttccccaggccacagtaggcagcatgagccgaagcctacctgggtctggcgacacctgcacatgcagtaatttgtgtcaggagaggaatttggcacttaggaaacacaaatccattttacaggacaaaaagcatccctgccttttgctacagagggacatatctctgtatttcaaggctgatgggctgtgcatgcatcttggaaaagatagtctggaacaaagacaatcagttcttctgcttagaagatgttcagaaatgcaagagctcagtagagtgttttctcccaacagcctcctccatggtctctcagagactttccattcagttttgcccagctgcatcctcacacctgattcaccttcctggagcaccaggcaggtgctcctgcttaaacatctgcttctgttaatcccatgttcagaagcctctcaagactctccagggtttgttaatttctatggcatgacaactcttttgtggcattcatcacattttgccttcttttatgtcttctgtttcctatactattagactgtaaaattcttgaggatagagatgatatttaatgtaatttattaatttatttatttttggagatggagtctcactctgttacccaggctggagtgcggtggtgtgatcccggctcactgcaacctccacctcccgggttcaagcgattctcctgcctcagcctcccgagtaactgggattacaggcatgcgccaccatgcccagctaattttgtatacttagtagagatggggtttcaccatgttagccgggctgatctcaaactcctgacctcaggtgatctacccgcctcagtctcccagagtgctgggattacaggtgtgagccaccatgccagccagagatgatattttaaaaagtattctagtacctgataatgtttagtataatagctgtaggttttccaataaatgttaaattgaatggatgttttcagtcttcctgaagaaaataagaagtacatttcttagggcttaaaattttgacttctgaatcacctttcctaatgtatcattttattagaagttagattactagaaatgatcagagtccactgtcaattacacatacacatgcacagacacctacatctcactcaagtatgtaaaagcgtgggcccttcttataaggatccccaaagtttatatgcaaacccttctgtttaggaccagcaggtttgtatgccccctgtgcagtaacagatccactccactgagacagcaggttttgcagcagagaaacagtttaatgatcacagggcgccaaatgaggagctgggaggagacccgcaaatccatctcctggggttctgggccggagtttctaagaggatcatggagggtgaggggctggaaagttggagtggtcgattggttggggcaaggaggatgaaatcatcaggatgtggaaacttcatttcctggtgagtgagctcctatgggacccttcagaccagctgagccagtagtttcatcagtatgcaggaactgaaggaatatctcaaagggaaaactcaacatttcataatgttcaagttgttatttgtagagcagttaagggaaactgtaatcttgtaacagggtctgccggattctggggcaacaggcagcagatggctctgaggaagcaggtcagagagcagctgatctagtgatcaatgctgagtgtgctgcaagctgggtttattgttgcttttcttcttccctgattaatttaataaagcttatagggatggtttaacttccttcatgaggcttccattctagactaggagactggtcatctacataaataaagaaggcgaaaaatacagacaggatagcgtgggttccaggtaaataggagagtaaggatgccaggagcgcagagcctagagggacggccatggcctgggttgctggccttggctttgtgatcaggtcaagtaagtggtgagaacagagaaaggctttcctaggaagcgcctgacctgagcggagacataggggaagggaggcctgaactctgctgggtgtgatcagcccatcttatcaatcactgcagtgggtggctccggagggcagtgaggggtggtggggtgccattgcctttggtgtcactcagaggctgtcactggaagtctttgagcagagaagcctcctgctcctataggccacgtccaagcaggaaacagagggtggctccagtgggaaatttctgattacggggaatatttataaggatgtgggcaagggaaaattcagtagctgtagggtatcgtcatcctgggcatgaagggatatgagagggaggagttacgggaaccgagagaaagggtcaggagaaagccctgtggacagtagagccatggggcaccttccctgcgaagtcacgcagctttattgtttcccagtggctgggaggaggttcttcactgtcggggagctggggcgctgagaaatccacccatacttacgaatgggacatggtgtctggtctttcttgaacaaatgaagtaaggcgcctggtggctactttatatctgaagagcaggtatctgaaaacacaacttgtaattgtagtgatataacattttacctgggtaagagtggattgctcagggctgctggagaaagacgtagccttacacttcccgatgattctgcgtgaacattctgagtttctgtgttggttcatgtttttaaaaagatttttttctttcttcttctgtccctccctcccctccttcttctaatgtaagttccctttcagggataattagcattgatagtttataatgaatataattattttcttattttgtttttgttttttgagatggagttgtgctcttgttgcccaggctggagtgcaatggtgaaatctcggttccccgcaacctccgcctcccaggttcaagtgattcccctgcctcagcctcctgagtagctgggactacaggcacccaccaccatgcctggctaatttttttgtatttttagtagagacggggtttctccatgttggtcaggctggtctcgaactcctgacctcaggtgatctacccgcctcagcctcccaaagtgctgggattataggcgtgagccacccacccagccagaatatgattattttctttgtaaaacataaacacgggggtcactgtgtgtgctattctgcaccttgtttttgttttgttttgtcttagacctaacaataaagcctgaaggcagtgcgtgtcagcattcacctgactctcccactcactcgtggtcacatgtgttccatcctatgaggggtcattgtttatttcacgcgatctgttggtgggcatgtaagtgttgtctagactcttgctagcctttgggattagaagtggaattgctagtgtaggggttcttggctatttaattggctagatattgccaaattgccctttcaataagttgcagtgattcaccttgccccaggaggtatgaatacagacgcctattctctaaaccctcaccaacatgttatgccatcttttcctcattgctagtttggtgggtaaaaaacagtacctcattgtataattgttggtttaaactacttttgaggggcttatttctgactgcccagccctgctgcagatgcaccgtctgggcacaggcaccaagagggctttcccagagccccttccctctgttcctgactgtgcaacacgaacagcggggttggcccagtctcttctgctgtgacgcaccacagagttcacctgggcagaggcattgcggcgaatgggaagcttctccccgtccatttagttaaaatcatgtcctccaataatttcttatcttactttctgttatcttactggactgatggttggcctttagttttccctgcccttcccacagccctccaggaagccctgctctccctcggggtgctgcttttgtgatggccacaccatctccttattttccttggggtaaattacatgttcctagcataaagaagatatatatatatatatctctgtatctatctatctatctatctatctatctatctatctatctatctatctatctatctatctatagagagagaatctcaccctgttgcccaggctggagtgtagcggcacaatcttggctcactgcaacctctggcctcccaggttcaagcaattcttgtgcctcagccagccacctgagtagctgagattacaggtggccatcaccacacccagctaatttttgtattcttggtagagatggggttttgccatgttggccaggctggtctcgagctcctgacctcaagggatctgcctgcctcggcctcccaatgtgttgggatttcaggcgtgagccacggtgcctggcctatatttttattttaatatgaacacacctatgcttagaatgatgatacaataatcttaaagattgactgaaccaaacttaccttttaagtacctcatactttagtagtttcaagtttcccatgactattcagtggatgattgaaagctgttttgtaattttgttactgttctaaatatgtcaagtgttctgtgccagcttcctcagtcttttgtcaatggacatcattgtatgtcttaaatatatctccattatctttcgtttactgttatacattttatgcacttcagtcttctatcttattcaatatttttcatgcttctgtattatcacattcttctccttctacttataaaattctgtgttttttcttgttttttttaattaaaaaaataaactgtggattgaagagaggttggttagtgggtacaaatacatagttaaatagaaatcagacctcatttctcattgatcaggagggtgactgtagttaacattgattgattgtatgtttcaaagaataattgtatatttcagagaataattcgaatattcctagcataaagaaaagatagatatttaaggtgatgggtattccaattaccctgtttgatctttacacattacatgaatgtgtcaaattaccacatatactctgaaaatatgtacatctattatgtatcaataaaatagtaattaaaaaagaaaaaatgtaattttctcctgtcttcatcttttctctatagattttataagatgcaggacagggtgattgttttcctcttggctctagttttaagaggtttctttagatcagtgctttctgaagatgcattggatttgctatttccagccttttgagtgtgaaatatgtgtgagaagcctctttcatctaaatcatgaatttcagagtcccactaggcgccactgtaattatgaactgagtgatccgatggatacttcctcctagtggaaaagccttgaatggagatgaaaggtcccttttaatgagctttaatgtctcatggcttttattcctttttactctgctttgaaagtaaaggtttgtggggacctagaagactatgaacatttcctcccatttctatgtcacttgagctggctaaggccactcttccctcataggctgtgagtgtgtatctgtgtgtgtgtgtgtatgtgtgaatgtggatgcatatgtgtgcctgtgtatatggggggtgccagtgaagaagtggatggaagtgggtcagcccctcctgctggggtcaggagggtggaggggagagaggccctctgggccagttggaggcccttcccactaggctgggaccccggagagcctgcaccccatttctcatcctgatgtggagtagctgggtgacggtggtccaggagctgtggtggactctgccctttgctctcacactcctgaggcaatgccacccccagagacctgcagcacctgcccctttctccttgttcctctgcccagagaagcaccgagttctcagcagtgacccctcctgacccttgacacctgtgctgctctcttgccctctctatgtgagtgcggtaggacactggtgcaggagcctcctggggagggggcagaagggagtctctggggcatctgtagtgggcatgtggggaagtggggaggaggaggaaaggaggtctgtgatggaggaggggcatcttaggcatgaagcagctgctgggctggctggggtgagggccatggcacagccttagtattttacttctagtcaatgaaacaatagcagctgaagtcgcagtaagagacagatcctgttaatgtgcatggtatgcacccagggaatcctcacatcacatgtttctccctttaagcaaaagggggctctcttttgtttccttttgcaattggatattactgggaactttaaaaaaggaaagcaacttaagtgttttatattctgaacttggaatgaataataactaaaatgacagtcccatgggacaaggtggaatttatcatttcacaatgcagcttaacgtacaattggctttaattaatctttttttaatgaaagatatattttttaaaagttttgtttctctgtatgtcaatataaaaacctatcatgaactttttccctggagaaactgccacccctgtcattgcctgtgcatgagatcggtgagggaggccagcaccttccctgcgtctgcacctgtcagggatgccagtcccctccctgtgctcctgacttgcccagagaaaatattttctctcaaagatttttcttttggaaaccacttacaatcttagaatcaaatacttagaggtattcttctttattttgttgttaaaaggagtttgggtagttttatgggcagaaggtcgtggtggcttttgataaatataagctgtcctgctggaagccgctgactgatgaggggtcttcgctccagcatttatcccatggttgcatcatcaacttcattatcggtacagagtcagctaacaaatatactccacttttttgtggacgttatttatggacttattttatggaatgcacaaatccaacttcaagatcattttttaaaaagtggtttgaaataaaaataaagtgattctgtccctgtttaatcaccattaagcccttgagccacaaggttggtgcaggggaggggctcctgtttgctgaggtgctgggcttgcgaacaggggcccttcttatgatgtccttcttatgaagttccaccgacacttagatatccagtgacctggtcttattagcctcattttagaggtcaggaagctgaggcccatatggcttatgtagcttggccatgttgccaaagccagaccgaggtacaggggcaaacgcacatggacactgccaaccccagacacgccacggccctgtgtccctacagagagggcaaaaaggtaagcctttatcacactctgaaacagcagtaagccattttcttttcttgattgacttacaaattgaaaaaagaaatcaatagacctgcattttctaagctttaaaagctggtagctgttttttcgtttaatttttttttatttcaatagcttttgggagtacaagtgattttgggtacatggatgaattatatagtggtggattctgagatttcagtgcacctgacacctgaggagtgtacattgtacccaatatgtaattttttatgtcacacctccctctcacccttcccattctgaatctccaaaatccattatatcactctgtatgcccttgcatactcaagcttagctcccacttacaactgaaaacctgtggtatttagttttccattcctgagttacttcacttagaataatggcctccagctccatccaagtagctgcaaaagacattttttttttacggctaagtagtattccatggtgtatatatagcacattttctttatccactcagtggtcagtaggcacttaggttggttccatatctttgcagttgtgaattgcgctgccataaacatgcatgtacggtgtctttttcatataatgacttctttgcctttgggtagatactcagtactgggattgctggatcaaatggtagatctacttttagttctctaaggaatccctatatagttttccatagaggttgtactaatttacattcccaccacagggtaaaagcattcctttttcatgacatccacatcaacatctattgttttttgactttttgataatggccatttttgcaagagtaagatggcatctcattgtggttttgatttgcatttccttcataattagtgatgttggcattttttcgtatgtttgttggccatttgtatatcttattcggagaattctctattcatgtcctttgcccactttctgatgggattatttgtttttttcttgcagatttgttttttccctatggattctggatactagtcctttgtcggatgcatagtttgcaaatattttctcccactctgtgggttgtctgtttgatgatttttattaatactctgatgattacttcttttgctgtacagaagttttttaacttaattaggtcccatttatttactttcatttttgtcacatttgcttttggggtcttagtcatgaattctttgcccaggccaatgtccagaagagctttcccaaggttatcttctagaatgtttatgatttcacatcttagatttaagtctttgatccatcttgagttgatttttgtacaaggtgagagatagagatacagtttcattcttcttcatttggctagccaattttcccaatgccatttagtaaatagggtgtccttttccactttatgtttctgtttgctttgtcaaagatcaattggctgtaagtatttggctttatttctgactttcattggtctatgtgcctacttttataccagtaccatgctgtgttggtaactatagccttgtagcatgacttgaagtccaataatgtgatgtctcaagatttgttattttttgcttaagtttgctttgtctgttcaggcccttttttttggtagcacatgaagtttaggattttaaaaaaattctgtaaaaaatagtgttcgcattttgatgggaatttcattgaatctgtagattgctgtaggcagtgtggtcattttcacaatattgattcttcccatccatgagcatgggatgtatttccatttgtttgtgccatctatgatttctttcagcagtgttttgtagttttccttatagaggtcttcgacctccttggttaaatatattcctaggtattttattttatgttttgcagctattgtaaaagggattgagttcttgatttgattcttagcttggtcgttattggtgtatagcagctactgatttgtatacattgactttgtaacctgagactttattgaaagtttgtcaaatctgggagtcttttggaggagtctttagggttttctaggtatactatcatatcttcagcaaacagtgatagtttgactttctcttttctgatttggatacccttctttctttctcttgcctgattgctctggctattacttccaatactgttgaataggagtgttgagagagagcatccttgtcttgctccagttctcaggaggaatgctttcaattcttccccattcagtatgatgttggctatgggttggtcatatatcgcttttattaatttaagtcccttctatgcctagtttgttgagggtttttatcataaacggatgctggattttatcagatgagaagctgataacttttaaaattagaatagttcctctaaaatgggaagcaataaaagagagaggaaagaatgccagtgttcccaaagtcagtgaaacatccccaaacggtaagcttcagcattgtccaaaatggaggtaactccagaaagtgaaggaatctgggaaacaagcacacaggaagaagcccacaagggcaagaggaagttctttgaggcaggagaggggactgaggggaaggagttgcaaggttggggagcctttgggggctgcagtgagctaatggtgtggaggacactggctggatgcctctgaaggtcatgtcaaaggacagaaggaagacaacagggaagtgaagaggaaggagaatgatggcataccccacgatcccatctgttcagtcatggggagaacatctagaagagacgggagcaggacagccgttgtcctgggatgtggccaacacataggccagcctaagcttgtgacaattccatagggatccccatgagaagctcctcctcgctgttcctcacccagcccagttccagcttcttccttgatgcccagcctgcatttctcagaccccggctcccagctgcccttgtgtcaagtgcgcagtgctccctacccatccttcatagcctgccctccccttttctgtcaattcagtcacgtttttctaaatatccaggctggaaacctccgagtcatagaatgtcagtgcagcgctaaagtgtagagattgttcccccaccttccctccacaccatgcatggttttagaatttctgccatgtggttccagcttctatgaaagcccattccatcttgagacagttgtacggttggacggtttctctttataagaaagtgaatcctgcctcccagcggtccttgctgcctctgctccccaacccagcatctaggtcccagttcattactttcagctgaagggaaggaggttgcgacatctgccccatggccagctcaggctccccgagcatcacttccccagcttaacatcctccggctgttctgggcattcatgcctttgcccagccctgctgcacacgtgggagttcttccacttcctcccacaaatgtgggcttgccggagcagaaggaaacgtttctccctgttttacactctgttcccttattcctgaagcctaactctgcatttgcccccatgtagaatagagactgggatgccctctggggccactatctccatgacttaccttcctcaatagtattcatcaccacctgtaaaggcacctgtgtctgcaacacatgcatgcacacacttgcacacacacaggcacgtgtgaagtcgtggagcaaggagtgctgtcagtaaatgtacaggggagtagactcctctagccctgccctcgtggagctgacggttcagcctcctgtggacagcaggtgcctctgggtccagggagaaccttgctttatgtcttaatgcccaggttatgtaaccagattaaagaaacgtttgaaaacttttgctctagagagcttttcagtaagttggatggcatgagtgattttccttcctgagaatttcttctttttttatgggagaggagattatttttaaagtccattttcttccgaagagtgaaaaaggccaagcaataaatccacagctgtgcaacctacctcagtgcaagtctccaggccataatttgttagcctccatcaagcaaaggagcatgtgacacttccatctgcccaagtgaaggcagcacgggttgtctgaggaggggacgaaggtgccttccctgacgtgtgtggatgacaccaacgcaaaggcactcattattcttcgtgcctgtcttggcttagctctgaagacatggggaagctggggacacactgggcaaagggagaagtcacatagcaccagtgactggtcacagcaccacagcaccggcatcaggagtggtcagcaaagactcccccagctgccctgtggtctgagagaagtgagggaagtcaggagagtgggggtgaggctggaggagccctggggaaagaccctatggcttgagtggggagaccagtgagaagtttggagtttccttggtgttacaggaagccctcagaagggcttagagggtgtgaggtagtctgttctccctggtaagcatcacccaggctgcccgtggatgggtagagggcttccccagaggtgggcgggccgggggtgactaggtcaagaatgctggcgggtagacaggggaggcagggccggtcggtccagagcacgtgtttttcgtggagttgaggggatttgctaatgtgggtctgaggtgggcaggaccctgggacagtgtccaggtctggctcaggccatgccatgcagaatgtgggcaggagcccgggctagaatgtgagagtgaagagactgaggggctgacccagtgaggctcggccatgcagctgcttcccacctgggcctcccttgccatctgccagctgttattaaggtggccacggtcctctccgcagtctgggccatcagtgaagttcagccggcttcttttttatttctgtagaaaatatcctcttcccacagggcagcctttttgacacctcttctttattgagaatcatgctaagcatgtgtgccaggtagactcatcagtgccgggagggacaggccgaggcgcaggagagcgcacagcggacggcgggaagccaagggcacgggtggagcggggccgctagggaagggccctcctcctgtcgcccttctgagctccggggtcttctaccccgacccttctccactgagaaattagcccagggagcggagccggggtgccacctatgctcacgtctgaattcccttgcttactccccaagctcgcccacgcatctcacagtacgttcctttccggtaggaaggccagtttttcatcttgtgcactttacacatctgtgaaccatggcgcaaacctgcctctcaggctccgtaacagttggaaatcttaaagcacaatgaaaaacaactattttctctctagaaagttctgcttctttttagtgtaagcctaggattgtacacaacttactttggaaacaagctggaagtcagccctctgctcccagctggtcttccccacccgcggagggcggagcatcagagccctcgccttcccaacagccagcatgcggctggtgccattagccaggcactggcatcttctaaagttcatctttttagaaagtattatttactttctaaatagtcacaaacctgcactgtaactatttactttctaaatagtttgtcacggcctgacaaacctgcactgtaactccgcagtggtgtccgggctcggccattcggcctggaggcgggcggaggccagggtgctcttggctctggagagccaggctcccctgccctgtggcctttgaatcccacgccccgggcgtgtgagggtctcgctctggctgttcccgccgcctgggtctcctggacactcccgaagcctccattaccacctggatgtggggggcgcggagggtcttctccaggcagcgctcactgtgcacctctggcactcggcacctccatggcacgtccagggctcccctgccaccctcatttctgctctggtcccagcccagagcatctgccagcggcccgctccagccccaccgctcgcaggcggaccctggacgtgccataggtcctcctcccctcccgccaacacccgggcagctgccacatcctgggcgagcggctccatgcgctcccagggcctcgtgctggggttagtgccatgctgtcgccgcctggagattcggggttggtttccgttttacaccgggtccccgcggtgtgcagccatctgcctgctcaggcccagcgaagcatctggaacacccagccgcttttcctgtcgctgcctcgcagcccagcccaggcctccttcgcggttccctgcctgcgggagcagcccctaaggcttatcgcctccgatttactgcccgcgctgtgttttcaacatgaaaatgtaaagacggcggctctgcattgcatcacatggagtctcccatcaaacctttcacctgctccaggccagcgtggacgcagctcctgcgctgggcgctctgcgcggtggggccgccacctcagccaggcccactctccccggctcccacacagcgtccagccgtctcctctcagcctgaccactcgctccagggcagggcctcccttgcaggggcttcttggtggcattgatgacaggcacaattaaataactcaccacgcagctcggtggttagtggctgtgtgtctcgctagagtgcacgtccagcgggggtctgccatagtgggaggagaacggagcccagagcttgtgtctgcccggtgctgagaaaatacggacgactgacagaatgcataaatgagtgaacacctctcctaaggaacaggcctgcctggcgccgaggactggggccgtaggctgcaggacgctggtggttcccaaggcgctgggtagctgtctggtctttcctggccaaggggaggaggggcgccccagccctcttttcagcctctttcccaggcgcctcccattctctgggctctagtttactcacctagaaaagaagagaaaccagatggtttctgaagtccgttgtggtgctagcattttatgtttttatttttgtcagagccccttaggaaataaaactacagtgtaaataatgaaaacaaaaaagaacattctacgtgcaagtgcttcgggcaattccctttttatattcctaagaaatgattctatttccatccacgcgaaatagggccattctgtctttctacttcacaaactgggcaacttttttcctttgagtttcaagaagacaatttaagtgcaaagaacccaacactcaaaacatggttaattgtgccttccttgtgtgtaaatgttgcttaggggccattgtgttagaattcacaatcaatgagcaaaatatcaacgttcatttttcaaggcacttcatagtagacaagggtagaacgccgcagtttgctgttcttctcacaattcctgggtgaaaattgtacttgtggtttgttagcgattttttcagaatgaacccataaattccttttggtgtggtttttctcactttactatattctgccatagtctctttttatttttttaaacagtcttgttgagatataattgacatacaataaattacaaatacttaaaatgtaaaatttgataagttttcacatatgtacccctgtgaaaccgtcaccacaatccaatagctgacatacccatcacgcttctacccagtggaatgagtggatgaaatggtgtgtatttaaattttaaagaaattgcccaactgtttcccacatggttatggcatttttcattcccaccagcagtgtatgagaactctcatttctctacgtctttgtcaacatgtgttattgtgtcttatttgttgtactcattatagtgagtgtgaatgctatctcactgttttttaattgtggtaaaatacatataatataaggtttaccatttaaaccattttacacgttcagttcagtggcattaagtacattcatattattgtgcaaccatcgccaccatccatcttcaaaactcttttcatcttgcaaaactgaaagcctgtaccccttaaacacgaactccctacttagcccttgtgctagatcctgataaccactattctgttctgtccctatgaacttgactactaggtatctcatattagcggaatcatatagtatttgtcatttcgtgatgggcttatttcagtcagccttatgtcgccagtgtcctcaaggcccatccacgttgtagcatgtgtgagaattttctttctttttaaggatgaataatattccattgtgtagatataccacaatttatctatttatctgtcaacggatactgggttgcttccaccttttggctattttgaatcatgctgctatgaagatgagtgtacaaataactcttcaagacctgtttttaattctttgggtatatatgccgaagtggggttgctggattattttgtctcgtcgtggtttaaacttagggtttcctgctaagtagtgatgttgggcatctttttatgtgcatatttttcatttgtatttctcctttgataaagtgtcttgttcaaatatcttctcaatttttgagttttgtttattattgaattttcagagtcctttatatgctctagatgcaaatcctttataagatagatactttgcaaatatattctcccagtctgtggcttgtctgttcattctttttaacagtgtcttttgaggaggagaggtatttaactttgatgaagtccatttaatccacttgtttttcatgtattgtgttttttagtgttgtacctaagcaacctggggtcaaaaagattttcttctgtgttttcttttatacattttagagttctaggttttacattgaggtctgtgatccctcctgagttaacttttgtatatgctgtgaagtatggattcaagtttattttgggtgtgggaggggtatttgggtgtccagttgttccagaagcatttgtagaaaatgattatttttgctttttgcatctttgtaaaagaattagttatgtatgtgagtttatttctaaactcttattggcctatatttacactgtttcattactgtagctttataatgattattaaaagcaggtagtatcatttctttatatttgttctttcaggtttttttggtgttgttttggctattctggggtccctgcatttccatatgaattttaaaatcagtatgtcaacctgtacaaatagcttgctgtgattttattgggatttctttgaatctatagaacaaatagagagagggggagaattagctgcttgacactagtaagtcttcctgccatgaacaaggtatgtttctccatttttttaaccttcttttatttctttcagcaatattgtgttgttttcagtgtacaagtctttcacatattttgtcaactttgtttctaagtactttatatttttgatggtattataaaagttatttttaaaaattctaattcctgatcttcattgctattatatagaaatataatagatgtatacgtatggatcttatatcctgcagccttactacacttactaggtctagtagtctttttgtagattacatcaaatttactatatagctaaatagagatttctttcatcctttctaatctatatgtcactactttttttcttgcctaattgcattggttatactttccagtaaaatgcattggctatttacacccaataaaatgtttaatagaaatgttgagagtggatctcttgtcttattcctgatggtagccaggaagcacaaatactttcaccattaaatatgatgtaactgtgtaaagaataaattattctaaagaataatttagatattcttttccaagttaagaaattgcttgtttattcctggtatgcagagactttttattatgaatgggtgttgagtttttcaaatgccttctatgtgtctattaaaaatatatatttttttagtttgttaatgtagtgaattacattgcttgcctgtcagatgttaaatcatccttgcatttctggataaacttcacttgatcatgatgtattgttatccttcttttttttttttttttttttttttttgagaccgagtctcactctgtcgccaggctgaagtgcagtggcatgatcttggctcactgtaacctccgcctcctggcttcaagcgaatctcctgcctcagcctcccaagtagctgggactataggcgtgtgccgccacactcagctaatttttgtatttttagtagagatggggtttcaccatgttggccaggatggtcttgatctcttgacctcgtgatctgcccaccttggcctcccaaagtgttggtgaaccaccacgtctggcatattgctattcttctaatatattcttggattagatttgctaaagttttaaaaatatattttacaactatgtttataagagattgttctgtagtttccttttcttgtaatgtctttggttttcatagtagggtaattatggcctcatttaatgagttgggaaggattctcttttattcagttttcaggaagagtttgtgtaaaattactataatttcaaccttatatgtttggtacaattcaccagtcaaaccctgaggtctggggttttccttgtgggaaggttttgcattatgatttcaaaaaaaattgtttttcgaggtagggtctcactctgttgcctaggctggagtacagtgatgcagtcttggttcctgcagcctggacctcccagcctcaagcaatcttcccacttcagcctcctgagtaactgagactacaggcatgtaccaccacacctggctaattttttttttttttttggtagagatagggttttaccatgttgcccaggctggtcttgaactcttgggttcaagcaatctgtccacctcggcctcccaaagtgctgagattacagatatgagccaccatgcctggcctcaacttcttaaatagtaacagggctattcctgttatctctttattcttgggtgaactttgataacttgtatcttcaaggaatttgttcattgtatgtgttgtcacatttgttcacatgaaatagttcatattatttacttattatccttttaatatctgtataatctgtagtactgccacctctgtcattcctgatgttgataatttgtgtcttctgtatttttttctgatcattcttgatagaagtttatcaattttattcattttctgaaaacaaaaacaaatgccttcgatttcattctgtgtttttttaaatttcattgatttctcctttgatcttgttattttcttttttctgcttacttactttttttcttctccttttttccagttttttcagatggaagctgaagtcattgatatgacactttttcaatatagatgtttagtgttactgatttctacctcggcaacgctttagtacaatcgtacaaattctgataagttgtgttttcattttcatttagttcagaaaacaaaatttctagtttccttttggcttcatttttgatctacaggttatttagaaatgcattatttactttccaaatatttgggcattgtccagggatttttctgctattaatatctaatttaactccatgtggctgggtaagataccttgtatgacccaaatccttacagcagtctgtgaggtttcatgtgctctggccccttcctgcctgatctcatctcctataattctcctcttcatcactccagcctttttaccactttttgagcccactactggtgtggggtcttcgttggctgttacccctctctggaactcttgcccatgatgaagggacgtggctggctgctcacttttctcagatttctgttcaatttttgctaaagtttttttttttttttttagacggagtcttgctctgtcactcaggctggagtgcagtggcaccatctcggctcactgcagcctccgcctcccaggttcaagcaattctcctgtctctgcctcctgagtagctggaattacaggcatgcaccaccacgcccagctaatttttgtatttttagtagagatgggatttcacgatgttggccaggttggtctcgagctcctgacctcaggttatccacttgccttggcctcccaaagtgcttaaaagatattttatgtctatgtttgtaagggacattgcctttttcagacaggcaattttgaccactcgaattgtagtaggactcttgcactcctttcctccctatttttctctatactgctttctacctcatatagtgtatatgcatttgttcattgtcagtctgtctcaactagggttaaggctcctgagcacagagacctctacgtgttcactgctgtgtgcccagggctagaacagtgcctgcctgcagtaggtgtttagtgtactttgagtgaatgagtggataatgtccgtggggcagcttggtccatctttgcaaatgcagaagcgatcgtctcccctgttcctctggagtttgcctgacgattgcaaagaaagtggcttccattctgttgaataatgagaataatcatgtttttaaaagctacttattaagagctctcttgtttaatgaaaaacattgtttggctttcttaagatccaattgtgatgcagatctctcaacctgcagctggtctctctctttatgtaacagcccatctgggttgtgctcaaggaaaccatattctaaatggaattctttaaggccttttcaaatcaagctattacatggctacattgtgtctctgtacttactagcctaactttgttaaatgctttgtaaatccaaaaacccggaacatttctaaagaagggcacaaaatgtagttaccttgcgtgttattttgaatgttggaatcagcatccaaaccccacacccactgtttgtgtaataattaattaacgggcatcttcaatgggcctggtgttttctgtgtatttgtttaatgacagaaagttttttttttttcaaattaataagaaaagttcaggaagacttccataactttagacaaatcctgatcatcagggtcagagcgaggaagcaggagaataatttcataaccccttcttccttcacggaggatgtctcagtcttctgaagttattttctctgggtcatgacctcctgcaaatgaagactttttcatatataaacaattataagtcattatacaaaaaatgttaaaatagaaaacaaaattgaaagtaaaattatattacctttttcaaaaactcctctcctacggtagaatttgttggtacctttggggaaaaagtatcaccaaaaaattggatgtttgttattcccacctctcttaggcagaaccgagctcacaagagctccggtcagcctcctgtgagccaagaagaggaagcaagacgattggtcatagcctggcccttcctcttcctccaagctctcccctctgaccccacctcccatcttaaaagacattttcatcttcttttcttaacctgactaataaataatttaaatcaaaatgtttgctctttgcttatcagtgcttgcctagcgacggcatgtcacacgtaaccctcttgcccaccctgcacaccctggtgcctgcacacctgctgctcacatgccctccctgtcctggcgccaggctgctgtctcaggtcagctcccgggtagagtgcttcctggctggcttcccagcagagccattgcaggcaggccagggccaggactcaggaaagactctagcgtggccaacatgggagccctctccagcttctccaggcccttcaggaaacatggagcccccagggtgctcctgtgtttcccgttactcctcgccctccagtctctctgcagctcatcctccttgggtgcatcttagtgaacctggttctgtctgctgctgatagacgttttcatccagcttcagagtaatcttattctaaacactacctgtccacaggctaaacgtaacaaattaaacttatactattcatttttgtcctagacacttaagctgcaatgccatcatccagagtgtttctgtgagacccctgccacaacagcaataatagtctccgttaatgtgaatggagcctctgcctgctgtgtttctgaacacgcctgccgcccatgaactggaacagagctgggtctgttcttcccataaaccgtttcacagaccttggttttccttcccttaaggtcaaggtctagcacagccaacatcaattctaaatttcttctctgtgtctggagggtacggtttgtgctctataaaatcagccccctttgcctccagggattgccatacacacaggtaactagcaagaagatggggcattgcaggggattcttgaggactctgatgtccagcatctgaggcccaattcctgttgacccacattttacttctgcaaaggctgaaattccatctttcagagccagccctttagatcaaagcctttccgctcaccagcagctgctcctcaaaggaggcgggggtgccacgcttcaccagggaggtgaagaggtgaagggaggcagcagcgcaggggaccccagtgaggctgtgttctgtgactccaggaaatgctcatgactgacagtgactgtacctgcgtgtgaagtgggtgatcccctggttccttcctgtgaggttgggagaatcctctccatctgctggacaaaaacactctaccctcacagagggttgccagagagctccagggcccagggcttgtgattggagggacacggagtgggtaggcggggctggagaaaccttggatgaggaaaagggggagcatgggaggcaggtctgtgcttgctacagatttttccgtatagtttttcatgcaagttgctgctgatggtgtttgcttccaacctggggccaggaaatgcccggcggagttgggaagggcagtgctctggacgatgataggctatgctctggcaggactccgtgcttagccctgttacacctgctggaggaaaccagcactcgctgagcacctgccctgccctgactccgtgcttagacctgttacacctgttgggggacaccagcacacactgagcacctgccctgcccagactctctgcttagccccattacactctctggcggacaccagcactcgctgagtacctgccctgcctggcatgatgctgagtgcccagcacgtgctgtttcctgcaggtctcctgggcatcctgttgaccattgccaggtaagggtgctggtgtccacgtgggacaggggcttgctcatgcccctcaggtggcgagaggccagactggggtcgtcactgctctctctgcccatgtctaagcctttcccatcatactgtgctttctctcatagaagtcttagaaacacatgtcttagttgaaaataaattagcatggatgtccaggacttggtgttgttccaacaaataaaacagcaagtgctgcctgttcctccagtcagagagtagatgtgtgaatcagcagaacctgaggtcctgctagaaccgtggatggctggagcatcttcttttcccttctgggagtacgtaaccaggctggtagtggtgcacaagcattaaaaacaaactcaattatgatgctgctgaaagcacaaaaacaatgtgcttgagaacaactattgatttttttcttaaataggcaaattcaagtgacttaagtacattctgctaagttataaatttacaagtgaaacatgcctgcataatataaccctgtaacttgtggagctttctcctcccatacaatcagcgatgtggatggagacataccgctaagagtggctgtgagagaaggcagctctggacccatgtggggagtagagcagtgtgtgttgggggagtctctccctaatggggttaagctgccaggcagggtgccaccccttggagctctgcttctgacagcctaccctgctctcaggtcttggaaacttgaactgataattgtttcaaaaagatccttaatgatatggagaactagagagatggttgttgaagagctgatgctggtctgtggcggagcatcagctgagagagagggtgagagtggggggcccgtttggttgtagtgccaacttgcctgctgaggatcagtgagttgggcaagggaggggaagggagagagcattcaaggagactcctgagcttgtgggtggagaaactgggtcaacagcggtgccatttattgtgacagagaagctcttggtgggaggaggaatggaaggagctttcgatggctgaaaaattcagccaaagagaaagacacaaaaacatgtccaaaatagttactgtgaaaaggccaggccaactctgaacaatgacagtgtctgtgtaaagtatgtaaaatactctattaaataagggttcagtacgggttggagcacagacgctacggaaatgtgcttatttaaactcttttcacccagattgaaggttttcctgggcaccagtattccaagggaaggtgacagagtcttgtagcaaggttagggtacaatcactcctggaatggaacgaacgtaagccactcggtgattaacaaattggaaatcagccccctgtacaatatctcccacctgcttcccatgctatagtgagggtctgccctgctgtctttttaaatctgacatctgaactactagaatagattgttttctgttagtagttacatattctgaaaagaaccagagattgaaaattcaaaagtataaattatgctttgcctttgtgctgaggaaaaaaaatgcatttgttttcatagatcctccaaaacatgaccttttacatggaacttctgcataaaaattggcaattgagaaggatgtaggcattccaacgagaatgcacctgaacagcatgtcatttttaaaggccttctctacaccatcatttgggagtgaggatgtctatttcatgcatgtatatacttttcttttaaattcctggctctacaacacacttccttttatctaacgtacagtgatccaggtacctcttgcactattcagcatctgcacacgtgtatttactggagacttatgcagtcatggcccgttaggtttcagcccactagcagtaattaatgccaaagatatgcatggctacagtcctgcttatgtattgatatactcccgactcatttgaagttgtttcctgacagagtgggggaggccacatgtaaaaatctgcctcaaaatttccagttccacggcccgttcttcctggaatgggtgcagcaagtcctcctgagcgcactcttccatgcatgttgtcccttgcttgtgggacaatgagccacatcctgtagccatctgcgcttagccacgacccacaccagggcccctgtggtccagctcaggactcaaagcagctgctggccacgcctctcaaagatgaggggcgctgagttgtccgcagttttcggagggttcctgatgcagaggtgctgatccaggaacacacacattcttggagcttttggcacaccttatcttctcctcctgtttgcaggatctttgaatgtgacttactaagaaaagatcttctctagagagaattttctgtaggaagcctgcagaaccctgacatctccccagcccccagtgacacacagtcccaccaagtgccggctagtgggatgggggcctcctcattgtagcagtggagctgtggccatgtgtcatctgccctgagcctgtggtgggcacgtccattcacgcagcccaggagggccatctcccagccccctggcaacacaagccagcattgtgaataaggaaaaggctctgtcattgggtgaggaagaagaactgcagctacacaaagtcgccccaggcaggcccttgcacaccgcagaatggtcctagagaccctgttatctctgttcttaaccctgtagacttcagggtcctgaggttgagtgaaactcatggaataaataaatgtgcacgtgagcgggatggagggctgaaggctacggtgccggaggcaatttcagctctcaaatcctaggattccacccacagaagattaaagcaaggactctgaacacagctttgtattattttagtaataaatacagcacctgaagaatcaccatttttctttttaaaaccaaatcctgaaatcctgataggagaaaaggtccagctaagagtcatctgaaataattttttttttttttaatggtggaagtcctgctcattgttttaccaggtgggcatgttaaaaatcccggaagagtatagacatcattcttttcagattctagtaatagtttcgcaaacactcataagattgcaaaaggtggcacaaacctagcttgctatcagctttatagctctgaaacctagctgagctacatacgtgatacttttctggtccaattggaaaaagcatcctgtaatagatgatgccggctttgagtagccaagccccattgatctgtggctgcattggtcactcaattacttccattgcagttcttcttctttcaaagctggttggataaagataaatgagccttgtcagcaattacaaacatgagatttccagttttgtaaacagcccgggagctgttggacctgcaggcaccagatggccaagtgccctggccgcccctcctctgaagttgtgctggacgccagcactcggccacaagcccatctgggacctctgggcaaggtgggccacacagggcgctgcttttcccctctgctctcctgtttagcctcacttatggtcctcagtgcagactctccttgtctcaagtcgacggaactcagctaagttttattgggccatgggactcagagacgaattaggcccttctttggcctacagtagcttacgccctaacagggagacaagcaacagctgtgaccacagtccagagtgctaggtggtgtggttgaggtacacccgggaatgctggggtgcagaggagtgagaagccacagatgctaactcggctgtggagggtgcacgtctcggaaagttatggaccccatagatggaagaagctgcagggggccatgtggctcgtgtgggaggtgaggctgcttggggctggccacccaggaaggactgtgcagactgtagatgagaagctttgcccgaaagccaagccactagatgatttttagccataaaacccagttagatttccactgccatgtaaaggatgaagtagggaaaggaaagttggttgggcaagcaggccagtggccagccttgttcaatggttctgtagaaatgtcacagtgcttggttcattcatgtgcataaaaagcatggatcaatgaaaaaagaaagcaagaaggaaggaagaaggcacacaggaaggaagaaaggcaggcaagagaaagaaagaaaagaaaagaaaggaaaggagaagatggtccctcctctactttaagcccatataaggctgcgatgttcattgtgtatctttttgggtattggtgtctggctctgtgactccatacagaaccctcaatgcatggtgaggaaatgcatgaacgaagcatgaatacttctcaccgcaggctgtgaggcaatgggaagtggagacacacagtcttgggctcctcccctccttgggagcccatcagagcccataaggtgcaacagaaaaggagtgacagggaaagggaacatcgtgggcttgagaaacattcagattaggaagtcagctccactccatcataaaacattggcaaatgtttcctgctctggggagaaaaacagaggtctaaaagaatctttaactttttcttttctgtgttttccaaagcaaccccgtagtgtgtctagtacgttgctcaagagtccctctgctggggccacctcctgactggccatctgaatcttccctgcttctcctcaggatccacaatattaaaaaacaaaatttaaagagtttatattttgcgtcttattatacatgcagtaaaattcagtcatgtgctgtagagccctgtgaatgttgaagaatccgtagccacatacatagcagcacaactaagacacgcagcaggtctatcactggaaaaacactcctctatgctgctcctttgtagacaacccttcccccgagcaaccactggccaccactgagctgttctcccactacagctttgccttcaccagaatttcatgtaaatggaatcatagccttttgggtctggcttctttcatttacaaaaatgcatttgagattcatccatgttgctgcttacatcaatagtttgtttcattgtatagctgtgtaggatcctactcattaagagtgtcttttcatcatttgaaagtcaattgttttccctccaatttggggcaaatacatgatgtgtattttgggcatatactcatggacatgttttcttgtgaacatacattttgtatattttgaacaaggctgcctggtaacaagttccatgcaatttgatggtatgatgacaaaaattccatatcctaatttattattaaaaaaaaaatcagggccaggcacagtggctcatgcctgtaattccaccactttgagaggcagaggcaggaggatagcttgagaccaggagtttgagaccagcccaagtaacatagcaagaccctatctcaacaaaaaatgaaaaacttagctgggcatggtggcacacacctgtagtcccagctatgcaggagattggcatgggaggatcacttgagttcaacagttggaggctgcagtgagctatgattgtgccactatacttcagcctgggcaacagagcaagttgccctgtctcaaaaaaaaaaaaaaaaattcagggtaattgaggtataattgaatatagtaaattttaccatttgaggtgtatagtttaatcagttttggcaaatatacagtcatgtaaccaccacctcaactgagacatagaatatttccatcacacccagaacttttctggtacccctttacattcaatctctcctttccactttcagcccctggcaagaatttgtcttttttttgtccctatagttttgtcttttcaagaatctcataaaaatggaatccagtttcctccacctaccataatgttttggatatccaatcatgtttttgtatgcatcagcagtttgtctttttattgctgagtagtattttattgcatagatggaccacattgtgcccagaggtctttgtgtggatgtatgttttcatttctctcacctagcaatggggctgtgaggccaggtagtttgctatgcttaattttccatagttgctatatcattctcaatcttccagtaatgtatgaaagttcgttttcctactgtctaatcagcacttggttctgtcagatttgattttaaaccattctaatatgtgtgcagtggtatctcattgtgattttgatttatattttactaataattaatgatgttgaacatgtatttatgttctttggtgaactgtctgttaaggtcttttgcccttttcaaattggattattttcttattgttgagctttgtgaagttttcatattttcagaatattaagtcctttgtcatctttgatttgaaaaattttcctgagtctcatctcttcatttttctaatagtatagttctcagacaaagttttaagctctgataaagttcagttgatgaatttgtccctttggggatcatgcctttagtattatatttaagaaatttttggctagcacaagatcacaaagattttctcttagattttctaagttttacttttacctctaaatctatgatccattttgagtttagatttatttttgtttgcatatagatatctattcattatagtaccatttgttgaaaagactataatttttcattaaattgcttttgtacttttgctaaaaatcaaataaaaatcagactagccagacatttaataggtgatgcagggaatgtgacagccagagtagactttgataagcgccccctgtgtccctgagggcatagaaagctgagtatgtgcacagggctgcatctgtacttgagaggccagaggggactttcatgggctcttcattgctgtttacatgaaaagcctcatgtaagaatacaataagaacaatagctgacttctcatctcatcagaaataagtgtaggccaaaaagcagtagtatgacatttaaaatgttgaaacgaagatacaaactcaagaaagaatttcatttctagaaaaactatttttcaaaatgatgttgaaaaaagatatgaccagatttaaaacaaaacaaaagaaagactcagagaattaattgttggcatacctaccttgaaagaaatactaaagaaaggaatggaaattacaacagacaataacttgaatccaaccctccccccgcccagaaaaaaaaagagcactggaaaaggtatatatacatctatatagctatacacagctatatagatgagcctgaataaatgtatttttgtcttttcttcttttaactaattgaaactaaaatcacataaagtaacatgaatatgcttttggccttttgacatagagagatgtaatatatattaaaataatagcataaaggaggagggaaagaatgggccaccttagagcagaatctctaggttttaatgaaattaggttagttattaatctaggccagattgtgataaataggatgtatattgaaatctcaatggcaattactaaaaacaaattgaaaacacaaagtaaaaatagcaacaaaggaattaaaatagtaggtcagaaaacatctatttaacataagtgaaagtagtaaaaagaaacaggaacaaaaaaaaatgtgagacatagaaaacagcaaaatagcagatataaatccaaccacataaacaattacattgaatgtaaatatactaaagactccaattaaattgcatagatttacaaactagatttttaaaaaagggtttcactctaatctgtttacatatttaggtttacgatccagattcaggtttagactaaaaatacgaatagcctgaaaataaaaggaaggaaaaagataaatggaatggtgcaaacataagaaagctgaaatggctatacaaatgtcagacaaaatagatttaaagacagaaaatactactagagaagaagacaaatgtcctcctagcacatttttatcagggtcaataaatcaggatgatataacaactgttcatatacatatacctaagaacaaaatccctaaatgtatgaagaacaaaacaaataaatggagactttaataacctcttcttaataatggatatagcaactagacagaaaaattagcaaggctatagaaaatttgagtaatactcgcaattacttgacctaatatctacagaatagtcaacccaacaaaggcagaatacacattgtttttttcaagcttacaaagaacactcttcaggatagaccataagctaggccataaatcaagtgctgatacatttacaaagactgaaattatacaaagtatgtcatctgaccacaatagaactgaattagaaatgaaccataaatggatttggggaaatacagaaatatttggaaattagacagctcacttctaaataacctatgagtcaaaagagaaaacacaaagaaagaaaatattttgaacaaaattaaaataaaagcataatctattaaatatatgagatataactcaagcagtgtttagaagaaaatttatggagttgaaggactatgacggaaaagaagaaaaatctgagaatattaacttaaacttttaccataagaaagtacaaaaagaagagcaaactaaattaaagtcaattggaaggaagaaaataataaacaatagggaaaatataatattgaaaataatagagaaaatcaatgaaacccaaattgattctttaaaaatcttgacaaaattgacaaattgttcatgagactaataaaggaaaaagaagaccctaattgccaaaatcagaaatgaaagatgagacattactaccagcctttcaaaagttataagtattataaaagaacgctctgaacaatgttacgctaacaaataagacaacttagataaaatggctacatgtgtagaaagtcacaatttaccaaacagaacctatgagaactagaaaataggaagagtcttataacaagtaaacagattaaatttgtgattaaaaatcttataaggaaaaactaaggcctaaatgactgcactgttgaattctatcaaacattgaaatttagaaaaatataccactacttgaaaagctcttccagattttttagtactgttctaatgccaaaggcaggcaaggctattaacatgaaaataaaactgcagatgactattttaggaatgtagatgcagaaattctcaacaaaatattagcaagtcaagtccagcaatatatgaaaggattactatcatgtccaagtgagatttttaacggtaatgcaagatttgctttaacattcaaaaatcagttagcctaattattccttttaatagcataaagggcaaaaaactcccacataattatctcaacaggaacagaaaaagcatttgacaaaatccaacacccattcatgattaaaagtctcgaaacagtagaaatagaagggaacatccccagcctggtaaaggctgtctacaaaagattctgaagctagtatcatacctaatggtgagagaatgaatgttttccctcggattgaaacttgccactttgattcaagattgtgctcatggttctggcaagtttaatcatataagaaaaagaaataaagacattcaaggaaagttatggaaaggaagaagtaaaacggcttttatttacaaatgacagaatcctgtatatagaaaattctatggaacccatgaaaaattctgtagaaaatttataagaatgaataaattcagcaagttttcagggtacaagatcaatatacaaaattctactgtattgctgtatattaacagcaacaataacaataatctaaaagtgaaattaagaaaacaattctattcaatagtatcagaaaggataaaacaggatgaattttagcaaaagaagtgcaagacatgtacactgcaaacaacgtggcattgctgagagtaatttaagaaagactcaactaatggaaaggtgttcatattcaagactcagttcatatgcaagactcagtatttagatgataactcgtctcaagttgagctgtagagtcagtgcagttcctatcaacacccagtaggctttttccccctcagaaattaacaacacgattctaaaatttaagtggatattcaaaggacacagaatagctcaaacatcttgaagaagaacaaaggtgtagggcttacactttcctatttaaaaacatactatgaagctactgtaatagaggcaaatgtgttcctggcaactacaaaggtaattcaattggaaaaggatagtcatttaaacaaacggtgctggaacaattggatttcaacatacatgaagacaaagttagatgtatatctgtatttatagattttcctattccagatatttcaaataaatagaatcatataatatatgacctttggtgttgggcttctttcacttagcgtaatgcttttgaggtgcattcacattgtagcaggtatcagtacttcatcttttttatggcaggaaaatattccattgtatgtttataccacagtttgtttattcattcatcaatggacacttgagttgcttccaccttttggctattatgaataatgccataaggaacatgggtgtacaatgatctgttcaagtccctgctttcatttcactggggtatatacccagaagtgggattgtgggaacatatgggatttcctgctcagtattttgaggcactgccatactgtcttccatagtggccccacaatattacactccccctagctgtgcacaagcattgaaattttcccacatcatcttcaatacttcttttcttttctttcttaccttttttatttaaatagctaatctgaagggtataaagtggtatctcattgtggttttgatttgaatttccctaatgattagtaatattgagtatctttaatgttggctatttgcagatcttctttggataaatggcagaataatattcccttgcatagatatactagcttttgttaattcgttcatatattgatgaatatttgggctgtttctacctttttgctattgtaaatagtgttgctatgaacatgtgtgtacatgaatttgtttatgtacctgttttcagttcttttgcgtacatacctaggaatggaatttctgcgtctgctttatttttgaaatgtattttttttgctgtgcatagaattttgtgttgacatatttttttcctaatactccaaaggtgtcaccctagcacctcctggcttgcatagtctgacaagttttccataattatcatctgtgtttttctgtatgtaatgtggtggttattttttctgtctttggttttcagaagtttgtgtatggcataccttggtttggttttgatttgtttgcttgttggcatttattctgcttgatgttttctgtgctatttagatttgtggtttgatatcattaattttgacaaattcttggctattttttctgcccatttctctctctctctctctctctctgtctctctctttctgcttcttagattctgattacacatgctggatgttttgatgttattccacaattcatgaaagctctgctggttgtttttttctgttcatgtttcagtttgggcaatttttattgttctattttcaagttcactaattactttctgagatttgttaggcctatagtgagccggtcaaaggcattctttttgttaatatggttttcatttctagcatttcatttgatgttttgttcttcccatctctctgctcaaaatactcatttgattttgtatggtgtccacattttccattaggcttttaaacatattaatgtcagttatttaaaatttctgatctgaaagtgtcatacctgagtctggtttcattggttgcattatctcttgagaggttctttttccctagcttatttatatgtcacaaaatttttgatccaaggtagatagtacaaaggcaaatattcatttgtgcctggaaatgaatacttttccttccattaggcctttaaggtggggttttgattcaggctagccaggaggacttggttcgtggtttgctgttgctatggttaccctcaatgcaccctaaccttcagattcctctcgtggtaccttgtgttcagggtggaaccggtttgcctgagcatttttaccaatgtgttttccgtcctcacttttaggtgttttctttgaactgattttcagagacagccttcctctatgctcctgccgttcaccctaaagtgattactacatgctgttacttgtcgctggacacttgttcacctggtgggactgtggctggtgctgtcctctgctattctggttaactttcagccttaggctggtgttgtgtccctgtgtcttgactgtgtggctttcagtgctatccagccttgcttcttgcctctcctcccctgctttaaggccttgttgctgtgccttcccctggaggcagtgggttttcatcagcgccctgggtgtagagtgcttgctgtcctcccataaggacgtcctggacagtgatccaggcctggcttcatgctttctgacagcacatgctgaccccttgccaggcctgagccacaaggatgttttctcagaaatgcaatctcttgcccgtcttcagtgagcactcagtgaggttcatgctgagagggtacaagggagtgtaaattcttcttttacttgaagcttcaggattgttctcttctcttgctagttcacatctagcctttgccaattcgtgagaagcttctggccgaactcttcatagtggtgtctggggtatctggcatgtatctgccctggctagcagctgctcacatcccatttttccttgcaggtccctccccctcttcatatttcaggttaatcagttgcatcaacacctcacttccatgatgcattcaagaaaagtttttaatttgcagtttgtgtggacttttttttattacaaaattggtagtgatactcttgcgagcttccttctggttggaagccctgaatgggaatttgaattagcaagataggagtcactttggtatattcactaaatcaaagtgtaaggtgtggagaaacacattctaaaaactgacctggtctttttctctttgcctataatgttccagtaattcaccttcacaggtgctttaagaatgactttcactttcatgcttggggtccccagaatccccccacccagggcctggacactgctaatgagcttattatttaaggtgcagtttgaacaatgtcttcttaatgaaatagtcatagattatcacaatgggctgtgctgtcttactggtccatttaggcacatgattacctgtgcctcatgctattttgtcaacaccttgtacattttcctataaacccatagccctatttcagagtccagtgtaatagatgttggataaatgatttaataaacaaggactagttggaatcacacacgtgacattatgttagtgaagctgtttattggtctgtctgctctgcaaatttatgagctaatgaaggcaagaattgtcttatttactttagagcccctatggggatagtaggctttcaatgtattttattaaatgagcaaaaaaattaaaggccttcaaaggtgggacacgcattggctcctccaaagaatcaggttaggaagagaatgaactggaagagagaaagatgtcgcattagcactatgagggcattaaggagcagcttccctccagggcccactctgctgaggcatgacccttcaagatacacatagcacagttctggaaaatcagttttgagggggcattctttatcaattagataaaagagatgactgccagtaaaataagcaaaaaatgttcaaagaatgttattcttagaaatgtcaccttttatgtgagttgacatttttgctgtggtttttcaattttgccaacaaaataaaaaatgaaatttgtgatagagttttccctcatcttgcattagaacacactctcagtgaagttctgttgggagacactccacatttgtttctctttagacagctgtactgtgttttgtcacggaggcacagaatctggaaagtgaaacatctttttttcttggattgcatttcatttgaggttgctctatctggggctgggttcctccagaaacaaacttagtagctttaattgctttacaaatgtagctttattgtaaatataaatcttctttcatcagtcttggctattatatacatacgaacatttagaaagactatcatgatattcagagagcaaaaaaggaaagacagaaagagacagcaagagaaggattgggttcattttccagttcttcttcaaaataaaatgtaagttgcaatagaacaaatgcttttgtgtgttttttccacagtgtgtctctagcacaggaatggtgcctggaacactgtagatgctcaaaaacatataataaaggagttaactccagcagatcgcttgactcctcagacctcagtctcctgtgtgtaaaatgaaggtttagatgagattgctttcaagattctcattttaaaattctgaaactttactataattttaatgtcagtatgtacgttacctttaggctttcaaaatcattttactctaatatggctttactctctgatatgctatttactttctggtatttaccatatggtaaatttaccagagagtaaatagcatattagacagtaaaatgattttaataaatgattctaataatatatataagaaaggatgaagcagttattaaagatgataaagcacacaaaagaaataaaaagatttaaggatcttggtttaacctgtggagatttaaagatctcaggaagtcagtattaatcaatggtaaggtgctgggaaaaaattatttcaaccaatgagtgactgagcaatagtgagacacccccacaaccgcagtgtccaccctgctgtgtggtgctgggatggtttgctttgaatatgtgaggtgggatggacactgagaaactagctcttactcaaaggatggcagctgccaatgatttaaacatcccttccatctgagaaagagtggtaggaactgggtgtgctggacctgaaaaagaatacaagggaggcttggtagctgccttccaacacccaagaagagataggatgtttccacattgctgcagggaatagagatgggatctgtgagtacaagtggggtgactgaacccacacaagggaggacaatgaaccataggcactgacagtgggatgccttcttaggcagcagactctaatcctggagatgtccaatgagcttagagccttgataaaatgatgcatttgatggacaaaatcaggtatttcttgagtgaagtttatgagaagagacactcagcttagaatgaaacagacaaggtacttttatataatgtcagaataattctgaattaggtcagagcttttttttcctcataatttcgtggagagatacaaatatgaaccatggatttttattttccattaaaaaatctaaagtagctaaaatcatttttgatggttgataatttcctaattcttggtcctacaaccttgattctcccgttcctcttcaaaggatatcgcctcagaacactggttgtttaaagtcattcaagcaaaagggtttccaggtccaactcattctgaaaacactgcgtaatatatccaacccttggagaagcacagtgcacatcagaatattaggctctaaggagcctgtaattaattacccgagtaacctgagttgctctttagtcggtgttctcaaatttatttgaccttggaatttcatttgaataacactcagagacaactaaaggagccctccttgggagttgggacaggcaggcatgagcctctgggtgtctcttcctatcaattccatgcacttggactgcagcaccaggaagtcttcacaggctgcttgggaagcttgcactattgtgttgggcaagagagtgcccttgctggaagccagggcccatattccaaaggggaatgcccagagggccaactgtggtcaggggagggaggtgaagaatgatggtagtctcgggcataccactttctcccctgtccaggacagatcagtctggacagaagcccgagagaacagaaggtagcctggcagggaggtttgcagagtgcagagttcacctacgcccctctcagcatgtggagggcctggttgttttagggaaacatttcctttaatggaattgagcatgtagggatcagacacattaaaaaatctctttgagagaactctgctttcagtcatgctcaccctaactctactttaaccctttctttcactaaggacacatttttgttatggtaagaacttttaacatgagatctaccctcttagatttttgagtgtacaatacagtattgtcatctataggtataattctttacagcaggtctctagaatttattcaaagcatatcagtataaacaaaagcacaaggaaacacaaggcaagatggcaagagagaaaaagagggacaaaaaagctataagacaaacagaaaacagtgaacaaagtggcaatagtaaatccttccctatcagtaattactttaaatgtaaatggtttaaattccccaatcaaaagacataaagtggatgaatggattcaaaaaagcaagatccagcaatgtgttgtctataagagattcactttaaatttaaggacacatataggctgaaagtaaaaggatagaaaaagatattctgtgcaaatggtaactaaaccagaaaagggtggctatagttatatcagacaagataggctttaagtaagaaactgtcacaagagacaaagaaagatgccatataatgatgaaagggtcaatccacccaaaatatataacaattataaatatatatgcacccaacattagagcacctaaatatataaagtaagcattgacagaactgaagggagacacagacagcaatacttaatagtaggaaacgttaatactccattttcaataatagatggaacatccaggcagaaaatccagaaagcaacaggagactcgaaaaccactgtagaccaaatggacctagcagacacatccagatcattcaacccaggagcaacattcttcccaagtacacagggaacattctccaggacagatcacatattaggtcaccaaaccagttttaacaaatttaagaggattagaatcataccaaggatcttttctgaccacatatgaaactagaaatcaaataagacattttaagtattgtaggaaactccagtactttaatgcctaacagttttagtaaacttctgtctcatctctctagagcaattatttgagccttagtcttctcttccataatgaagggataatgctatctaaccatatccaggttgctgtaaaaatttcaaaagaggcatatatagctcatagcataatgctcagcgtataatagtacttaagtgaaattcctgcatgttttctttctttttacctcctgcaaggagcctaatttataactttctatcaacgtagaaagtctaatcttttttccaagtctctgccacttgccttttccaggcaagagcagattctctcagcagctttcctcacttggtctagtttcctttttcctctgtgtttgctttgctgctgtgtgggaaggacgagggccctgggaaatttccacaacttttcttctctcctgctacaccttgacctctgacaggaccacatctttttttttttctctacaagatatgtaatttaaaaacaatataagcagaacgttatagctttaaaaacagatatgcaagggcgtgtcttctgtgcagtgtctcttgctattcaaaccatgtgcaaggaaaggggcccagggtaactgattgaatatcaaatcagccccaaacctcctctcggagtgacctcaccaaacacagactcttctgatgagactttcctctcttttgtttttctttctttttgatggtcacattctcctggtgcgtatgagctcgttttagaaacagaagaatgaatgctgcctagcgagaactctactgaacagtgttgcaaaaatggaaagaaaatcatttggattttaaaatgcccactagactttcgtggtttcacagtcagcaaaaggtttgatactaaaaattaaagttaactcatggaattatgtccccagtgccattgtaatcatggtctgcctgagttttaaaaaaatgagatctgaatttctaaaatagggtcaatttaataaggattatttgtgcttaaagttttcctcctgaaatgtggtattctacactaaaaggccactctaatatgcctcaaaatattgtagaatgtggttcatcacaggcttgttaaaaagagcttgcctgcctttattattccagacttcctttctgagaaagagtcacgagtacctctgtctgtttttcagttagggctggctaatttcttccatgaatatgaaattcagagcagcaaataataaggcagtcagaatagtcaacaggccctctgcagacaggtgcagcatcctaccctccaggtgctcctgacctctgagccaccaggccaggcaagggagaccctgggccagctcatggcttacagactctccaaggcattggggctagagtttcgagcttgactgccactctgataagcccctgatggtaaagaatattgtgtactctgtggtttcattgcagtaaaaatgtgcatgtgaataaaaaatgtgtgcacatggacaagccaaacagcatttctgttaggataatgagattataagtggctggaaacttcaacatttagtaggtgattttttggtttgttttttgcctttagcatatagtcactaattttaagtgcatttttccagctagagaagcaatgcataaatgcattctcactgtaaaattataaagtcagacaatgtagaagcagagaaaaaaccaggggatctccctgttcccttatcactccctccctagaagggagtcccttgccactattgctctagcgtttttttctgtgcgtttattaagtataacctgttttaagaatgttaagtaggacccttcctgctctcccttagtctcacttgagcccagagcgtagtccagcagtagtgacaaggaccccactttttgaagggggttgctagagccaccctgctcagggttggccagggtggggccaatgctcgcctgtaaactcagcccaccaggcacctctagggtgtggagcagaaaggctgggcgccgatggggatgtgtggacaaagctccctctggagaaagtggcagggctggtgtggggggaagtgctctccaacactccccccacccccccccacctcacgctccccgccgccacacttgcctgtaggtctgctctccgctgctgctgcgggccctggtgaaggggctttgagaaagctgccctcatgttgcccagaaaagtccagagtggctcctgagctctgaggaacgctgctggattaaagagggtgcagaggagacctctgctccgagactgctgacaccaggttgtcgcacggaggatatgggtgccaagtgcaatcgtcagctggagccgtgttctgggatgctgacctcagcagacagaggggtctagtactccttgagtagggcggagcgacatcctcagagaagcacaggagagagagcctccgcaggcctcagaggacaggtgcctcagcctgcctccatccctgcctgccatggggagggcggccacggaggccggtgtgggctggccgtgtcgaggagaggggagatcacgctgaacagccaagtggaagagacatgggctgtgcagtcgatgtaactcaacacatcctgggctgcctctgaaggtgattaagcaggggaaaataattaatactgtgatttagctcagctttacagaagcatctcagcaagtgtgaagtattaaggggagagtgggcgtgaggtgggaagatgggatggagcgaaggaaagaatgtagggatggcaggagggagggaagaagagatggtgtgcagaatggcttctgagacaaagaggcagatgaggccactgccactgagaagggtatatatctgcatgtgcacacagcaccatgggccggaaccgcagcaagccagggagaaactattttaaaatggagaaagatcggacataccgatagcaacagaaattctaggatttcatgggtgacagactacaaaggctaaagaggaaattatgacttcaaggactaaactcaatgttggagcaagagcagtgcccaagaaggtgggccaggaggtagctccgttcaagggcacatggcaaaactttggtgctggacattgctatggactaaaccatgtccccgcaaaatccatagtccccagcacctcagaatgtgactgtgtttgcagacagggcctttacaaggtggttagttaaaatgaggtcatagggccgagccctcatccagtctggccacatcctttcagaagaggggattgggatccctacactcacagaggaaaacattgtgaagacacagggagaagacggccaaggaacgaggcctcaggggaaaccagccctgccctggcctgatctcggacatccaacctttagaactgagagagaacaggcttttgatgggaaaccatggcctgcagtgctttgtcacagcagcctgagctgacggatgccagcctgctgactttgaaggacctgggggtggtgcctggcagggtttgcacagagcctgggactgtgacctcacaggggtccacctgcagggagtaattcctgagtgatgggtctccaagggatgcagtacggagtacgaggagaggaggtgtgaggagaaaacactggagagaatctgctttcatagattttaataccatctccataggtgtgggatctttttcagtacaggagccaatgacacacaaagtcatctgagaactgggcgtctgggcagcatggcccctgcagttagaggggaagagaacacgtgacagaggacgagcttcactgatgcaatgggcagaagtgaagaaaacaggccgccaactgtggggtcgccaggccgcactcagccagcatatcccgtagggggcggagctaaccctactgtgtgggccagcttcctggttcacgtggcccagggcgccagccccagagggcccagcttcttattaacaaacacacagacacacacacacacacacacacacacacacacacacacacgagttctaaaaactcctttgagcaagtgactggagagaatatctacaaactacaaactaaagagggctggattgctgtcatcgtctgctcaggctgccaggacaaagtaccacagcctgggtagctcagacaacagacatgtatttctgtaccgttcgggagcctggaagtccaaggtcaaggtgccaggagggctggttctcctgagcctctctcgtggcctgcggacttggccttgctgcgtcttcactgggtctttcctctgtgcgtccggctgcctctctgtgtgtctagacctgctctgcttataaggacacctgttttcccggattggggccccatcccaagggcctcattttatcttaatcacctctttaaagagcttgtctccaaatccagtggaattctgaggtcctgggggctagggcttcaacatatggattcctagggtcacagttcagccataacaactgagaaaccaaaatggtctcacatgtgcttcagtggctgaaatccagctagaactgctggctcaaagatcagagaagtggaaatggtctacaccaagaagctgcctgcaccacatgaaggtaccttccgagggaccagaggagtttcatccatacctgggttcaaaggttacactggtctccgctcaatgatgctgggtggccaggcacagcaggaggctctcagtgcagaacgcggggggcctgaaggcctcagatgtaggcccttgaacttgtgttataacatggactctcttcctcactgccagagagaggcgggggcagcagagacatcatctggaatgcactcgatggggccttcactggccccccacagtggggtgaggtgacaccagcattcagtgaacagatttgagggacttggtgacagtctacaagcctgtttattgggaaacaagttctgggtggacttcagtttgatacaagatgactgaattaaaaaggaaataaacagtggcaataatcaaaacatagttgaagaaaatatacctgaatagaaaaaaaaccatagaaacagattatggaatgtacatggaaaatatacttcctgtgtcccagttaacggaatgatattttaactaaggcacagcctgtcagcaattttaattacaaagataaagacagatatcatttctacaagaattcaggaattgtatacgcacaaatagaaacaaaattaagaggacttccaactcctgggtatccaactcctgaatagtcaatgacaaagctttgagaggaaatggctgtgatcccaaagctccagtttcagatccagccaagtttcacatgtctactaaagttacagaaacctgtctgtgtctgttattaacctcctgtgtgaccttgggtatgacttagcctctctgggccttagtttccttagctctaagcagtaataataatgctccctatctcacagaattatcgtgaggattagctgagctaatactcatgaaccacacaaaatgcctgatgtaaccactcacaaatgtaacctgatattattatagttatcagatgtcatctttctccaaacatatctgaacaaatgacatatattgtaaataataagaatttaacaaatataacctgagtctaaaatctcatattgaattaatgaagatcacaaaatctcttgagatgtcagtgagagaaattaaaactttctattaggcgggtcaaaggatactggttcatttatttatcttttgtcactgagatatatagatttattctcattattttttggcaaatctataaataaaaaaaggaataaaaaactcaaaacctaaaccaaaattatataaaaatagccaacaaaaaataagaattaaatttctaactggattctactttaaaactgatcagagtaacttgagagaattaaaacttgtgaacaaaaataaatggctaatacaacttaaataatacaattgaaaaggtagaattatagagaatattttatagagttcatatttaaaaattcaatgagacagtcaacataatagttctaattgccaaaaatattgcatcagaatagagaaaatgaatttaatcagaaaatataaggggaaattaatagaaacttcactgccatggaagactttcatatgacactatctgtctctgagcattgaattcttagacatatagttctctccattttctttttttccttttttttttttttgagatagagtctccctctgtcacgcaggctggagtgcagtggcgagatctcagctcactgcaacctccacctcctgggttcaagggattctcctgcctcagcctcccaaggagctgggactacaggcgcctgccaccacacccagctaatttttgtatttttagtagagatggggtttcaccgtgttagccaggatggtcttgatctcttgacctcgtgatctacccacctcggcctcccaaagtgctgggattacaggcgtgagccaccgtgcccggccagttctctccattttctatggaaaataggccttttcaagagtccacaaaacagctacaaaattcatcatatattaagccaggaagataatctcaatgatttcctaactggatattttccaacatttcttcaattattttccagtctttgaccagaatacattaattgcaaaataaaaatgagagggaaaaagtgatcctctttcaaaaagtaaattaaaaaagtaatagtagtagtagtaatagaatttgcagtagtagtggcaaaaacaataatgcataccatttcagtaacattgacaaagtacagaattacaaagtattaagtcactactttatacattttaaatttcttagcagaaaatattgttttaaaggaaggtcaggcccagagaggttggctagttgttcaggacgcacagcaaactcacctcccattccagggcttggctatgatgccttcctcgtgggcccgcaggcggcttgctcagctcagggaaccacagcagcctcagagttcacggcaggccttgacgctgtgcttgggaataatgtctagacttagttattttaattgttttcaaattgaggaaaagtaataggcgcacaaagtaacacaggagagaaggaggaaagagctgaaccacatgaaggcaagcatacaaaattagaagactaaaaatggcagaactggtaagccaggaggcgattttggggggtaaacattattgatagtacaggtagagttttagcgtcaagaaagagaatgggaaagcaaaaattaacaaaattaagtatttaaaaagggaatacagtagcagaggtaaagaagattaaagtcagacgattacatgctgataaaaaaaatacagatttcacacaatgggtgattttctggaaaaacatgtattattaaaattctagaaactagtggaaccaatggatactgtctttgggatctcccacgcccattctcctctctttgccattaaattcttcctcgctgtggaacacaagtctcaaagtcacccctgcagccacctcagctggactcggcccgcggccacggagcaccccccagctgggcgctgcctggagaacccacgcctctgcggagcacacggaggggcggcccattgatttccgtgcgcggctgtattttttttttttttttttaggcttctctctcccccggggcctctcgcaggcagggcccgtcctctctatagcgccgccctttctccgagctggggccgtggagtggcagtagcgctgtgaccttggcgggaccgcggtggagagtggggcgatttgctgtgagcaggaggacctgggggtgtttatgggcctcagaaggtgtgaggggacctgatggaggcgttctaggaggaggccaagggggtgtcgctgcaaggggagggaaggaagggagggaaggaaagaaggaagaaggaagcaaaaaatggagggagaaaagagggagggaggaagggagggaagaaaggaaggaaaggaaggaaaagagggagggagggaaggaaagaagaaaagaagggaaggaaggaagggaaggaagaaagaaggaaaggaagggagggaggaaggaaagatggaagcaaggaaggaagaaaggaaaagagggagggaggagggaaggaaggaaaaggagatgggaaggagcaaaggaaggagggaaggaaggaagaaaggaaggaaggaaaagagggaggaaggaagaatggaagggaggaaggaaggaaaagagggagggaggaaggaaggatggaagggagggagggagagaggaaggaaggaaggaaaagaggaagggagggaagtaagaaaggagcgggaaagagctccctggtggagagggccgaagccaccgctgtccatcttggattcagaggccacgggagcggccgggttctgaggagggaagtgggtaaggacacgggaggccaagggcagctgcgctgggcaccgtgcgcgcccatcggggaccttccccggcggcgagggaggaaggaagggcgagcccggcggcctgcggggagggtcctggagccgggaggtggtcgcttctccagggcagccggtgtggatgccggttctcagggagagcagacaggcggcaatgagcctcttctgccggcggagacggggacagcgccacacacggctggaggtctgagaaaccgggcgcactgaaagcctcgcccggccccgcgttgcccgtccctggcccctcccggcttggggtccgcgcagtgtctccgtggccccgcgcgcgaccaggaggcctgcggaccccgcggagcccccgccctgaacgccccttccctccgcccgcctggaaacgctcttgctttgtgtggcaaataacgaggatgagctttgtttccagggaccgagactttgttatggaaccgagttgggatattgtatttccatgcttggtggtgctgggggtggggggcactgcaggccctgcaaaaaagggggtccctgccccatctcagcttctagcctttcctcataaaaggagttagctaaggactattaccctgggagacccaggagatggggtatgaggctgttcagatgggggctgaggatgagcctggtcctgaggcccagaggggccgcgcacaggccgaggcgctgcacacaggccgaggcgctgcacacaggccgaggtgctggggagggcaggcctcaaggggtccactggcacagaaaagggacagcctccgtgcccgggcggcttgctcgtgcatcctccatgggccttcggaagtagaagcagttcttccttctgctcagaatcatgtgttacctttgtagaagggcgacagccaaatggctttttgtttaaaaaccatagttatggtttgttattaaagcctttttttttatttcaataggttttagggggaacaggtggtgtctggttccatggataagttcttaggtggtgattcctgagattttggtgcacccctcaccttagcagtgtgccctgcacccaatgtgtagtcttttggaaaggaaacataaacaggaagaatggtttcagtctgagactcaagtaggagacttcattagcagacacttcttttggaagccaggctctgttggaaacgctccgggcactattctggggctgccccatttcccagcaatccggaagccttggttccttagagaactgtgtgtcagcacaggcaggtttttaacttaaaactaaacgcgtgtaacacaggggctgtgtgggcgtccatctgacgtgtgcatcgtgatttgtgctttgacacgcaagtgccttccctaacatggcatggtgagagagccagaatggattgaaaatcaccccggagggagatgaaggcgtagtgtgatgctggatgttgaacaaatgcccttttcctgagcttttggttgagattgttgccttgaggagaggcttagggtgcaagacaaatggatcttctgggaaatggaggctcccggtgaacccgcagcatccgtgtcctgtgtatctggagtcgtcctggcagcgacaggaagtcataacatcctctcttcaaataaatctccctctggctgcctcccggctgggcagcgcatgaagcattgaagctccaatcaagctgcttgcatcccacgggaggaagcaactggctcggccccagaagaaacaggccagcctttgaagtgccagggaaagagctgcccgcaggccttgccttccccttcagaaactcgggcgtgtgccactgtgaacgggggctgccaccacagggtcccatagacagggttatcactggtctcttcttgactctaactaatgtcaaccctaaaaaacaagattcataaaacatgactaaatataaagtttattcgagtccaaagctcgaggctggccaagccaggagcatagattctacttgccctgaatgtacactcagattagctgcagttacaagagagtttttaaggaaaaaagaactggcacttcctaagttgttaccgagaatttacattagaataacataagctattgattcgctatacattgttctttgtatcacaaattccaggcaggagaagataataggtgaggcggctagtcgggaacacagtgtctttaaacagttgcccctgggtgtgggggcaggagaggaggagtgacggcgtgtgactgaagtcccatactcgattctctctggacctgataattttgcatatctcacagaagttacactgctcaaagctatatttcttttctcagtaatagaagaatttttttcatgacttccaaaatgtataaggaagaggctgcagtgtgagatggtccctgtagggcggtggagctccctcagcctgcctagctcagacctgctttcttggcaggggccgcacctcacaggcatccacctagaaagacccatcctgggccggccctccctgcgccaggtcacagctgcaagtctgcctttccaaccgctttcagctggaagccgggccttcctggagccctctgtccagtacactattcccccttcctccactgccattgtggctgctgagcttaaaatgtggcaagtccaaacagaggtgtgccattgtcatgcgacccctctgactccagtaggagtttttgttttgttttgtttgagcaacagcaagatttagtgtgaagagtgaaagaacaaagcttccacagtgtggaaggggacctcagtaggttgcctctgctggctggggtggccagcttttatttgcttatttgtccccacccacatcctgctgattagtccattttacagagtgctgattggtccattttacagagtgctgattggtccattttacagagtgctgattggtgtgtttacaatcccttagctagacacagagtgctgattggtgcatttttacagagtgctgattggtgcatttacaatcctttagctagacatagagtgctgattggtgcatttttacagagtgctgattggtgcatttacaatcctttagctagacacccagtgctgactggtgcatttacaatcctttagctagacacagagtgctgattggtgcatttacaatcctctagttagacagaaaagttcttcaagtccccactcaacccaagaaatccagctggcttcacctgtcaatcacccctctaaacaggacaccccaactgctgttgggaattgggacttcctgctggataggggcaaagaaggtgccctgcagttgtagtgtgccccagaagggaactctttaggccagtcaaagggccagtgggtcagtccatgggtcctcagtagaagttgttagttgagctcatttgggtttccatttgtaagaccatctgtagcttgatagccttgatcctagaggaaactaatttgacaaggaggttaaaagtacagggcccaaaggcaagtaatagcaagatggcggtcacaggacctagaaaagggagaagccatgtagcccaactccagaggccggtatttgggaactgggacttcccgctggataggggcgaagaaggggccagggaaggagacgtaaggtttattgaggatttcatacagggcggtccaggagcagtgggcaggacaggaaaatcctctccagtttgtaaagagcaggcagattacagagcattttcacttggcgccctccacctagcaacctctatttggcccagaaccaagggcctggatccccagggtagcctgcctgtgttcaagggatggctgggaggtaggtgccctcctgggaagcagggctgctgggctgggaggagactgtgcctcagggaaaaggcgaggctgccttggtactgggtaggagtgagtggtgaggacctagccaaaggtaggtgagaggacaccctctgtgtccatttaacaaagcagagtttcagacagggtgtgaggcttccagagagacatttaacattcactgagcttcaggagagctgaccaccccaagccaaggccaacactgcctagtgtcctcactaagcaacccctcaggacacaggttccaactcagccactgagggagagagagacaaggcggtgtcagtgtccttcatagagaaggagcgaatgtctgggttggctgctcccagattccttagctgggaactctgagcacacattcttttcagagatgaccatagggtccttctcagggcatgcttcagtgccatgagtagaacatccatactggatttttttatttaaaaaatgtcaactattccatcaaaatgttatgttgactatatggtcaaataatattttggatatgttaggttaaataaaatatattattatacttaatttcatctgtttccttttactttaaaaaatgtgatagttgaacatttaagactacacaacatatttattggtctggacttccttgcattttagatagaggctgacaggaagctgacaagttcctttgtcagagctgtctgaaccagagcgactccatcttaaataggggttgactccatcttaaaatgaggctgaggcccgctgggcagcattcccaggaaggtaggcattctaattcacgggatgagttaggaggttggcacaagatacaggtcacaaagaccttgctgataaaacaggttgcaataaagaaactggccaaaacccaccaaaaccaagatggtgatgagagtgacctctgattgttcgcactgctcattatacaccaattataatgcattcctgttcccggaccaaaccgagggtcgggcttattattcttgaagcccaataacaggatgcagatgacctgggaaaggaaaagagttttattttatttctataactggttaagggagaaggtctggtaaatatctccagaccaactcaagattacagccttccagctataaccttctaagctgtatgtctacatgtaagtgtgattctttcatctaaagacgtaagtgattagtttctaatccataactaagacttgaatcctgaaaaccttcctctggagcctcaggaaatttacttaatctaaatgggtccaggtgcttgagtgatttgtcttgtctcttgctaaatcatggagttatagggagttccttcagaccccagataaacttgtttgtggaagcctggggagtttcttcagtcccccagtaaaacttgtttaatcctaaacgggtcctgttaagaattccctcgttatcttgtcatgcttcaaggcccaggaaaggcctgggcaaaactcttggtgggctttttttacattccagtgtttgtataaggacactggctctctcagcttttgatgttgaacctgagcactcagtcagtgctgagatagttttttggaggcctgcgtccgtgagacctggcctgctacactcacctggtaagagacactcccaccagcaccttgacagttcacaaatgccatggcaacatcaggaagttagtctatacagtctaaaaatgggaggaaccctcagttctgggaattgcccacccctttcctggaaaacgcatgaataatccaccccttgtttagcaagaaatatctacacaaaatatcaagaaatagctacacgtatccttagtccagcagcccaagctgctgctctgcctatggactagccattctttattcctttactttcttaatacacttgcttttgctttactctatggattcacctcaagttttttcttgggcaagatctaagaatcctctcttggggtctggatcaggacccctttcctgtaactccttcaccttcccaggacctgatattcttagggtcagcaagtgttttcagtaagggtgaatgcatatttcaggctttgtggaccgcaaggcctctgtcacaactgctccactggactctaccttggtggctctggggtggccgtagacagcaagcaaatgcatgggcggctgagtcccagtcccagtggagttttctcacaagaaaaaggtggtgaccacatttggcctgaggctgtagtttgttggctcctggtctgtaaaaagggagcagtttaccttgagttgtctttggaatggaaggggagattttcattcatggaagccctgctgtgtgcatctttatgagataagggctctttcagggatcttgtggcatgtgcaaaatgcctttcagtgtgagtgttattctttgctggctcatggtaaccctgcaagcagatgatgaagccaggatataaaatactagagctggcatttgatgccaatctcctccccctcctgcctctcctttctcccctctattttcccctctctctcttcccctctccttgcctctgtccctccttctttctctctccccgtctccctcctccctctttctgtatccctctctgatccctctccctttttccttctgtctctctcccctgtcccttctgtttctcagtgccttccatttctccctctgtctatctctccctctcccttccctcctacctctctctctgtctctctccactccccaaacccccacccctcagtggctgggttggaacctgtgtcctgaggggtttcttagtgaggacactgggcagtgttggccttggcctggggtgatcagctctcctgaagctcagtgaatattaaatgtctctctggctgcctcacaccctgtctgaaactctgccttgttaaatggacacagaggctgtcctgtcacctacatttggccaggccctcaccactcactcccacccagtaccagggcaacctcaccttctccctgaggcacagtctcctcccagcccagcagccctgcttcccaggagggtgcctgcctcccagccagctgtgccctgggcatctgctgcctgtctccccacaggaagggccctaccatagccagggacatctccatcacaccggcatcgcaaccactcacagcagccgcatcattgcccacttccctaatggctagtgatgtgaggcatctttttgtgtgctggttttccactcatatagcttcagtgaaatgtctcttcatgtcttttgttcgttttctaattggattttttagtgtttgtaccactgagttttgagatcttttcatatattctagataagaatcctttgactggtctatggtctgcaaatgttttctcctagccagtagcatgtctttataccctcctagcagggtcttttatttattgagcaaatgttttaaaaaatatttttattttgatgaagttgattttatcaatttttttttcttatggaatcatacttttggtgtcatgcctaagaactcttcactaaactgtaggcctcagatttttatcctatgttttcttctaaatgttttgtagttttacattttgcatttaaatctgtgatccattatgagttaatgtttgtataaagtgtgaggttgaggttgaaatttattttctgacatttagatacccaattgctctagaagtatttgtcaaaaagggcatcctaaagtgtagtgtatatgctcagtggaatactactcagccataacaaatgaaatcacgtcatttgtggcaacatggatggaactggaggtccttttcttaagtgaaataactcagaaacagaaagacaaataccacgtgttctcacttataagcaggagcttaataacaggtacatgtgttatcagcatgagatttttggctctcaatgtaagagaaattaacacaagcctaggcaaaccgtttttagacaaggtccattaagacttaggcccagaaaggttgggcataagggagatttagtgcaggaacaaatgttacctggctgacaccctgaggggagtgcattgtggtgtcttaaggagggtgacatgcatgaagtaggtaagcatcactgaatgtgcagggtggagtgttcgggtgcacaggctagtaagggggcatgctaatccacacgtcacatgattagaaaatggcagataagcccctccctgggtggggatttcagtattacaataagtcatgggttaaagatggctcattattctgctcttaggtacatgctggtgatggggttaactttttttgagtgagatttatgttaggatgttgcttattttaggtttttgaggtcctgcagtcagcaggtatggctccttgaataagatttatggtgggaagctgcttatctcagtttcttcagagagcttccaaggtctggtcaatgggcatgtatggaaaaataccatagtggaggtgggctgagtcctgtgtctactctgtctcacatggacatggagtatggaataatagacattgtagactcagaaagatgggagggtgggagagggtgagggatgggaaattacttaaaagtacattattctggtgatattacactaaaagcccagacctcaccactatgcaatatgtccatgttacgaaactgcacttataccccttacatttatacaaatataaagaaagaaaaggctattcttgcaaagactcacttttgcatctttgtcaaaaataagctgggcatactgggcatggtggcacctgtagttccagctggctgggaggctaaggcaagagcatcccttgagcctgggaagtcaaggctgtagggagctgtgatgacgccaatgcgctccagactggatgacagaatgagaccccatatcttaaaaaaaataagttgggcatgtctttatgggtctgttttcaggttctgtgttctggcccattgatccatgtgtctatatctgcatccgtgctgtattgccttaattactggtgctacatagtagaccttcatgttggatagagagggtctcccattcagttcttctttgttaagattgtctttgctattctagagcctgtgcctttccatatacattttagaataagcttgtctatggctagaaaaatttctgctaggaattgcattaaacctagaatcaatttggggcaaattaacattttgtctatgttgagtcttccattaatgaacactctatatctctccatttatctagaactgctttgggtttttttttttttaatcaccattttgtaacttacagcacacagatgctggtgtgctgtaagttacaaacacgatttaagtttaaaacaagatttaagtttatgcctaagtgtttaattttaattggagtgattttaagtggtattgtgtttttaattttaatttttatgtattcattggtagtttataggaaaaaataaggtttgaatgttgatcttgtgttgcagtccttgctgaacttactgctcactgattagttttagaaatgttttgttttgctttttttttcaatttcttaggattttttaatgtaagctatcatgtcatctgcagatagagagaattttatttcatctattttagtctatgtgtcttttgccttattatactgacttgggctttcagtactatgttgaataagagtggtgagaatcctgtgggggagaagcattcagtttctccttattaagtattatgttagctgtagttttttcatttgcttccttttcctagatgattttctttatggggttgaggtaatacagggatcataaaataatttagaaaatgatgttccctccccttttattttctggaagcatttgtatagaattagtgttagttctttaaatatttcacagaattcaccagtgagacaatctggccttacaattttcttttttggaaggtctctaactaccagtttaaattctctaatatatatagggtgatttaaattatttcattctagttgttaaatgtatatgtatacaattgttaatagtacaacagtagttaatatgagaaacttttaatcttttgattaaatcctgaaggttttttgtgatgactcctgtttcattgatattgaccatttctcttttttctctttttacttgtcagtccttctagaagctggttaattttattgatcttttttaaaaaatcagctttgtttcattggtttttctccactgttttcctatttttaaattcatgaatttatgctcttatctttattatttcttttcttctgcttgtttttgggtttatttttaaattctttttctatttccttaagatgggaacttaaattattgatttaagaccttttcttttttctaatacaaacatttagtgctatacgtttccttctcaacaagtgacatgttagctgtagtttttaatttgctttcttttcctagatgattttctttatagggttgaggtaacacagagatcataaattagaaaatgatgctccattttcattcagttccatgtggtttttttactttccttgtgacaatctcttggatctatgaattatttagaagtataatatttaatttgaaaatgcttggatagtttctggttgcctttctgttactgatttcttatcaaactagcaaatcaaatcaaatcaaatttgaaatcaaaattagtttgattgcttatggtaagaaaaaaaaccctctgtataattttaattcttttaaacttgttgatgtttattttttggtccaggatatgatctgtcttgctaaatgtttcttggatgctgaaaggaatgtgcattctgctgttgttggctggagcactctgtagtatcagcaagatttgattgctggaagatattgttgagttctctctgctgaatttctttctagttcttccatgaattacagagagagagaataaaagtctccatctataatagtggatttgtcagtctacaatccatttgtgcatgtgccactttctcttgtcatttactttctcttgtcattttgtcagtttttgtttcaatttttcagctcagttatttggtgaatacacattcaggataactatgatctctcggtggattgactgctttatctatatgcaatatccctctctgccttggaaatgttctttgctctgaaatatacttcatgtgatattaatatagccattcctgctcttttgattactgtttgtgtggtttattctttatccgtgcttttactattttgctatttattttgtttcaaccatcaaacataatttaaaaactcaagatgaaaaggaaagtttatcatatttaaccatacatttgctctttattttgttattccttcctgatactccaagattccttctttttatcatttcatttctgtttgaagaccttcttagcagtacttttagggtaagtttgctgctcttctagtttttcttcatctgagagtgtcttgagtctccctttattcctgaaggatatttttgatggatatagaaattggggttgattgttcatgtcttttatcaattaaaaatattatgccacttttttctggcctccatagtttctgaggagaaacttgtagtttttctctataggtaaattgtcatttatctctgactgctttcaagaaattttatctttctttagttttcacgagtttgatttgttgattgttgtgtcttggcatagattttggggggtgcctagcctttttaggattttcccagcttcttaaatctctaggtttatatcttttaccaattttttaatcattatttctttgaatactttttcatccctgccctctttctccgatgatacaaatgttagatcttttgttcatgtcccacagatccctgagggttggttccttttgtttttttagtcttttttcatttttcagatgaacaatttctgttgttgtatcttcaagttcaccgattctttcctttatactctccattatattattgtgcccattccgttagagttttacttcagttgaactgaaaaatttccatgtggtcctcctttatagttttaatttcttgtctgagactttccattttttttcacttatttcaagtgtgtttgtcattgcttgttgaagaatttttatggtagctgctttgaaatccttttcagataatttcgacatctgtatcacctcagtattggcttctgttgattggcttttctcattcaacttgaaacacccctggctcgtgggatccccacgtggtctctgctgttaccacaggagaggggcttgctacagcctggtgagtgtggaagttctggttcccacttggccttcaccaaggagcttaattttttttcccgtggaatttggcaggagtggttattatctaggagtgttatgtctagctttagtgccctttcctggctttctggctagggagagcaggcttctcttggggctttttgttttctttctagtacccactgacgtatcagcttcccagcacctagtccaggatatatgaggggaaacaaaaaggaaacccacctccatgccattctttgggaccccaagatccccagctgatctgcctcttcttcatctttatggtctccttatgcttgttttctataaaatgccaagcttttagctctgcttagtgggaggaattggaagaaacgcatccacttcatcttgcttgagaactagaagcctgctttatcatctttaatttgagagtaaaattctcttctccgataaacccttatgtatttgtatcattaaattccttaccaccaaacacaactcatgcaccagggaggtgctccaggcttactctgtgattttgggcactttgtaatcccagtcaacatgcactttggggcaggtgtcccggtttgaggagcactggtctgtggctaaaacttgttgagggctcattatgtggccactgttctcactgttctaagggatttataagagtgaactcatggaatcctcatagctctcttaggtactgttattaccttcattttatatataaagaaattgagttatggagacatttaatacttttccaaggtgatgccactgggcaagagcaggaattgaaaactagagccctaagctagtgtattgtggtacctgtctctgttgggaaaatgcatttgggttttgaagccagaagaatattccaagacaccatctctgccttttactggtggtggcctttgtcaagttccctactatatgcaagcttcagttgcttcatctatataataggggtaacatgacatgcctcaccatgtttgggaaataatagataatgtcaacgtctagtctatgaggcccttagcatacagcagatattcagtaagtcatttacctactaatggcaggttgccattgttatgatttatccatgtccacagggaggcagcatatgtagtgattaggagtacacactcttaatcactcttaatcacacaatctaactagagttagactgatgcatttggattgtcacaccagagcaaactagctgagagacccaggcaagcctgcttacctctcaacatcccacctctgcagtaggtgtgatgatgccaattccagaaggcactgtgggcagttgagagggtcctgtgcatggagagtgtcacagtgactaggtgttgtgagggagagtagggtttctgatgggtctgagtgattgcatcagttctgggtgaaatgaaaatgtttggtgatgctaggtgatgctccttctctgcgttggtgccatcctcaagacatcagtggctctcacttgggagcacggcaaaaccacccaccaggaactttctccagtcttgggcttctcaagcaaggtctgctttttgtggaattcaccccttggcaggcaaatttgcttctaaaacatggccaggtgtctcagcacccggattgagattctcggcatcttacctgacactgactcactctacacaatctgtcacagaggaacgaaggctttgtgcttccatgaaggcttgcagtgatgtctgtgatgcctggagttgaccagacactgtcgtgggttgtgtttttccagaactcaatgatcagggctgacattttgcaaacatgttcagctattttcaaaaacaaagttgataaagttcaagaaatttaagtagttttcccaaaatatgttctgtgtttctttttgtttgttttgtaaaataaaatgtgttcagaagagaagccaagagaatcctaccactttcttgaaatgcccaagtctactctataatttcgggagctgtctcgctcatggaatcagtttttgtgtttaattgtagctctgttgaggaacccttgctgtggctctttctgagtagcctcttcctacacttatggccagggaagagagaatgtctttataattgccacatgctaggctcttactgctaaaacttaagccttttgaaaccaaaattgtaacatttgcaggggcttcccttagtgaccaggcagcactgagcaatggctacagagcgtgcattacccatgccaagtggcatctgtcagtgcctggaagctggggtaggaatttgtggagatgtgtgtacattggaggaggcacacaatgagggatgcttctctcttctcatgactgcttttgtatctgtgcataccctccttgtccacacgtctcacacctcaccggctacagaagaaaaacttcttcttccctttgcctttccttagacaacagttggccttagtttccaacactacttatcaagctctccttggccttaagtgtgagggacttcaggagcctgctggaagctgggatctctgggaaatctccagagaagaaaagttggaagatgacacaagtagaggaaacatccagagatttaaatggtggcccagcacatggcattgaaagaccaacagtctaatatagatgaacaaacagaggctccatatagccattaaaaatttgagaaaaccttaagcagttctcaaataaaattgcacacaatggaggatgtctaatagaagcatgcattcacataatttagtctaaaactaacttcctgatttatggaaataaaaggtagtggccattgtgaaaatgcaaaggtgctaaggccatgttctcatgagctatgagtccgtatctcatgagattatccagatttcagatgccataactcatttctctttgtatttcaggctgggcttcccaatgatggttgtgtcctgcactgttgggatgtgttatctccttgtggctcatgtggtggtgggatggaattaatagacatccatctattgctcgaagactaaaggaaacttcatccatcacaacccattagtcataaaactaccctgaccccactgtttgaagaagaaaaggtgcttaccctggagatgctacagagacacagtggaatagaccttgacactaacactctaattcaagcgaatgttggaacaccatgacctcctctgtgtgtcctttctccccaaggacaaaatgtagaaagatgtgagataacttactcaagattcccctccagaaaaatacgtatgtttaaaaacccttcctgctatacataggaaaagacacacatccacctaaaattgactgtactgtttaactgtcaattctcctgaggctaaacacagtttgtttttcttgtaatcacttttcatgttaaaataatcagcattcaaattgtatgctttctgaatatagactttctgggaaaaggtttactgctcgtaaggaaacattttatgtattaaaataaactgttccttgataaaaggctttggagtagtttacattatgtaaaattgcattttatccatttatatttttctctgcagttttaaagttattaattaaaagtccagaaatttgacttgcagaagatcataggtatcttttaaggatatcttacatatttaacagcttagagtaatgatttttccattttgcaagtggtgcatgctatttccatcaattacacagacgtacactcgataccctcagtcctgctctccctgcaggacgctgtggctcagtcggtgtttattaaatgcagttcttttgtgaagcattccttgtgaggtaagggtaatgagaacaaagaccaagggggagccctgtgcttcctgcgaggtctcctctgctctgcctcatcagtatcatggctatgccccagaggaagaagcccttcttcagtttctgatcttctgtgcatgacaccttggaatgaaaatggggacactgctccgaagtgattgtgtgtcaagcgtctgacttcaaaagttccaagatgctcagggcactaagaactgcaaggcaggagacctttctggtcccatttctgtcacaggtgccctcaggatgggtgtccctgtctactgtttagagtctgtattgtcgaatggcaacacagttcttccctgaaaggttgggagtgtttatatgccctttgaattccttgacagcaaagctgacgtgcaaccgtagtttattttaaaatgcagtgttggacaacgtcacacagaagccttgagacacgtgcagctgactggatatcccggaggagcccctgccacagcctgtccagggaagggttcttctggccactcccgtgctgcccgtactttgcttggtctcactggacctggatatccctgagccggtcactgaaaagcactgtttcctcttctatcccacatcaggatggctggggacagcactgggctccctcatgtccggctccttccagctcagctcccatctgctctttcatcctttaacacgtcatcccctacaatgctcaggccccatctcccacccactgcctctcctcgttggtgcctctctctactcttcagtcatgccttctcattcttttttctttctttctttctttcttttcttttttctttttgagatggagtctcgctcagttgcccaggctggagtgtagtggtgcgatctcagctcactgccagctccgcctcccgggttcacgccattctcctgcctcagcctcccgagtagctgggactacatgcacccgccaccacgcctggctaattttgtttttgtatttttagtagacacggggtttcactgtgttagccaggatggtctcgatctcctgacctcgtgatccacccgactcggcctcccaaagtgctggaattacaggcatgagccaccgtgcccggcccatcccttctcattcttaaaaaccattagctccgggctcatttctccctcttgctcatacccccagcctcccccgaggttcctattcatgccccacagttctgatttctctgcccccacccccttctcccactcccctccgtgttacacccaccctgggtctccaggacctgcctagggtccttcatctctgtggtctttctctgacgctccaacacttccagtcatttaccccaggttaccctctaaaacaaaacttgcccctgctggaacctctcgttcattggcctaggacattttaaattcccctgtcaactccctcgtagcttagttgtttgtttatgctctaaaatttaaaagtcaaccaacaaactggccccatgctacctttactgcccctcaatgttgctgaggtgaatcatcccacagggatggctggttttatttttaaatgaagatctcaagcatcagacaggacctcagcactgcctggctctttgattccatttccctagcgcagcagccagagaactggctggaaataggtgtctgcccacattgggtaagtgcaagtgactgcagccagggatggtgcaatcctttagggccagtgagaggaggcagctgtgggcctctggggggggggggggggtgggggaccaggacctggagatgcagggagctgtgtccagagggactggacgggagccgtggccttctgctggggctgtgccagcatgagacacttggtagccagggccgggggtgggctgtgggaatcatcctgagtttatgcctttcttcctgtggcttccctctgtacgtggactgagctagctggaagccaggggacaggaagcactgctgatgctgtccgggaatgggagtgtggcaggaggagcagatggaagatactcagctttatgtactgttttgctcctcagcagatgaaaagtccacttctgaagaaaggagacactaaaagtgccatgagcttttccactcaagagaccacgcgagcttgcccacactccctcctgacgctgtctacagaattattaggtgaacaatccagtgcttattaaatcctgtgtcgttatgatggaaaaagacaacctcgaagaaaccagctgtgcctttgctataaatgttggactgccacaggcagttgtccttgctagagtttgcccgacatcacgtgcataaagtcctgaagaccacagggacggtgaggacacacttttactgtctgaattcaccatgaaaatccagatgaagggtctgtgtgctgcagacgaggatctggtcctgcctgagcttgcatgaggagctgtgccttacctttgacacacggccccacgcaggcaacgtggcagcagcagagtccatgggaatctgagccacttcctcctgcagtgcatgtgcgccttccagatctgctggggcccagtcttgtaaatgcaacatacttcataacagaagatcactgtgcacatctgacttgatggttcagtggatcagatagcccttggcttgtgacgcacagcccaagttctgtagtcactctgttttccacagtcagatcttcaacctgcaccaaggcccagtggcagcctggagctgcttttctagagaagactagtacactagtcagaacaggaaggcagggacttcattcagatcctgaggtttgcactcctattctcccctcaaggcttgccagcatctccctacagtgtgtgtgtctgcccttgggatacctgcagctgtgctgtgctatttcacaaggcccaagtggcagggcagccagtgtggcaacctggacctgtgagctgcacttgcttgctctggtccccctcaaaccttgcagccttgggaggttacctgctaatgggtcagagcagcgaatccaatatgttatatgctgccttcgaaattaaaagtggaccatcaagaattgtatttttttcttgtttttgatgattggtacaactttttctcactttgtagggtaattttaagtcactcctaaaattaccatcaggatgttgtatttcttttgtgttaccatcttggtgtgagatgggcaacttcctcatgtaataggaaacaaacttggtcattctaatggttatttaacatgatctctctcagcattcattctggagaaggggaataaccataggaagggtccaccatttcataggaccaattattatgcggacttagcacaagaatgcacttgtcacttgaccaacataagcctctattctgtcttaaggaccagaggatgttttggatctctgagaatcagggaaaatttaaaaccattaggaccgtctggatatttcttactggaatgcaaaagtcacctggtaaatggccacaggtccctctgaggaaggtgtgggaagagcagtaaatgcatccgtgggtctgttgcaggatctttctcaaatgcacctggctgacctctcttcaatcaatgacctgtgaggctaggaacactctcaggtctgggaagcagcttgtgtcattcatccttcttatgatgactgaagcttctccccaggtccagattctctccaggtttctatgtcaagcttcccatagaagccattgctttgagctctgtgatccacttgccttttggcacagacctctgaagcataatgtggtaactgtgccaaccttgactatgacaattaagcacaccgctggtctttaccaccttggaatcccattattcccactgagaaaagataactttattccattactgcctctcctactgtcagcaacagtctccaaaggacagatatcagagacttctaaggacactggtggcccctgcaacactgcatttattaatgcttcaatgcaggaagtgtccactggattctcttgcagggaatgctaggggacagctgagtaagggacacataaaaatctgagcctttggactcctttctctatatgcccaatattaaccaactgtgcatattaataatgcctattccaaggggtcagctaacacattaaatctcaaactcccggtgagtgtgcctgtccaggaatttggcccgttcaagccttgtattttatcctctgggatgtaatatacttagattccatttccttaagtgcactccaaagaggggtgtagttctgtaactttttcaatatacaggttaatttgtcttgaaggagacgttctacttctctatccaggatgcgttagtatcttgtaagagccctggagaaaatgatgggtattgagggatgaatcttgagacaaatacacatcagtttctgaggcaactaaccaaggtgcagtcactaggtggctttaagtggagaaaagaggggtgggcttgtggatcagagggagatagagtgattcttcccacttaactcttggtcaagattgtctttgctaaagcctatgcttgcaaataaattttaggataagcttgcttatgcctattttaaaaaacttgacctgatgtgatagaaatcacactaaacttataagttaatttgggaagaattgacaattttactatgttgaactttccatcccttggacatgatatgtctctccatttatttaggtctcttttggtttctttcatcaacatcttacaattttcagcgtgcataacctggacaagttttgttagatttataattgagtatttaatattctttgaagagaaaggtactgtgttttaaatttcagtttccaaatctgcataattaacgtgtagaaatgtgattgatttgtgtgtgtagatcctgtataccatggccttgctgagttcacttattagttacagaattaaaaaaaaaattccttggtattttttacatagatcattatgtcatctactaatagggacattttcatttctgccttctcaatctttatgcctttaatatatattttttgccttattctggtggctagaactcataagaaagaatttggccattcattcactaagctagatctacttgcaacaacttctttcagtttttcttcattctagaagagtttcatttcaccttcattcttgaaggaagtcttactggacatagttcttagttgacagttcttttctttcagcccttgagaaatgctctgttacttccttgtgcccatatggtctctaatgaggaatgtactgtcattcaaattgattttcccctacagataagttgtcatttcctcttgctgctttcaggaatttcttttttttatttaatttcagggatttgattatgttgtggcttagtatggatttctttgagtttattgtttttgaagttttctcagctttgtgaactttagatttcttttaccaaaatcgggaaattttcagttaacaattatccaaatattccttcagccccattctctttttcttcttctagaactccagtgatacaaatgttgaattacagtcttaaagctctgttcatttttttttcagtattttctctctgtgttcatattggatgaattttattgatctgacccaaagttcactaattctatactctgtcgtctccactctactgttgaacacattcagcaagtattttatttttattttatcattatcatatttttcagtgtttagttttcatttggttcatttatttattgcttattcattgcctattgcatcattttgtaatataggctttagaatccttgtcatataatttgtacaactgacttctcctagtgttggcatcagttgattgtcttttcttatccaagttttaattttccggatcattgcatgacagatgatctatatatactggaaaaactggctattaggacattatggattatatttaaaagttgaattttagcaagcagttacccttttcaggtttggcacaaaggtcctggtgtacttttgtgcactgcggctccaatgactgtctagttttgggagctgatgccatgctattttggtctgcttgctttatcattggtgttgatgcttccactgctccctgctgatgctgcttgaggatgtggagaaaatacccaggtcaggccacctggtgtccctaggatgatgggatcttctgacttgctcatttgttttgaggttctcccccaactatggagcagtgccgaccatgagcatttcccagcccaggtagtttgggagcaggatattcctcataggtgcatcctggcctcagtgtgtctgggttggggaagggattcatcaggctcactgatgggaagaggaacacttattgtcagtggagattcagattgctctccctagttggttcttctgggctgacctggtattgttggtgggactcgtgttcagcttgaaggaagacagagcccatctgggctgtcttctgtagctaggctgggccaggaataattctggctgggttaccttcttctgttgagtggagggtgtgggtgccccaccactatatttttcctcctaccctggattccaaaccagttcaccctcctcatccacgtttcagagttctcctttggtcatctcaagttaccaagatgcataattgtactgagtggggagcaacaggcagaaatagaactttctggaaatgtcatcttttccagatcaaaattctcatttgctgttgagaaagaactcatgtgatcaaacgagaatactcattttttttaatagatattaaatctaggtttaagataagcatagcattatttctttaatttcaaattggagagagttagttttaggtaaacaggtacaacttaaaaacaggttttaggtaacctccctgtttaattcttatatgggttctttccataaaaactgacgtctgggtggttctgcactgagaaccactgctcactgctcccctcagtcagttccaggccggcctgcccacttcatggcctttgtcaccctgacactggctccccaacatctaaaaccagcagtgttttagtctggaggatcttgaaactgttggctgaacatgcccagaactggctgttatacaccacaatgtcaattttcagcggcttcttactttttcaaagtagcttagtccagaataaggaagaccgatcgaacacttactcacatttctgacttttacattttctgcaggacatttgttgtgctgtatataatcacagttcttcccatgtcaccatgccccagcaggggtccttgccccatgtgactgtcacagccatacctcacctgcactggcatgaggctggggtggagtcccctcctcactgtgtggttgttggtggtggggggctggaggtgctcactgagtctgtctgtgtgcctgtttcctgggcagtgatctgatggtattaattttcaagtggaggagacagtaagtgaaattgatacatttaggagtgataagttttggggaaaatggagtcaagtcatttaaacaggttcattgggagggaacatctgaatggatgtcttgagccagggttcttgttacagccaggaggtctgtagcatgagcaggatgagtgagggtggaaccagggtctgatcccaccagactgtaggccaaagagggactctggatcttagtgcctgggagaagcagctagataaatggatggggatgtgggagagaggggagtacatcccactgtccaaaaatggtatgctgtctccactgctgcatcaaaggccaaagttgggtgagggaggagactgactttatttaggctgtcaccataggagaacaccccagatctgaagaccagtgtcgtggctggggggttatcctggaattttacagggatggttaaccagttgcagaggagttgactcacagctagggttgttccgcagaagaggaagtctccatcagtttttggaacaaggattgtttttctttctagttaagtagtttcagggggaaaaaagttctatttatttatttatttatttatttatttattttttaatacagagtcttgctctgtcacccaggctggagtgcagcggcacgatctcggctcactgcaacctccatttcctgggttcaagtaattctcctgtttcagcctcccgagtagctgggattacagggatgcaccaccactcctggctaatttaatttttgtatttttagtagagatggggtttcaccatgttggccaggcttgtcttgaactcctgaccccgtgatccacctgccttggcctcccaaagtgctgggattacaggcgtgagccactgcgtccagccaaaaagttctaattttaatgttgatgaagagtgaaacgctgtaaaatgtttaaagaggtttattctgaaccaaatatgagtgaccaaggcctgaagcacagtctcaagaggtcctgagaacatgtgcccaaggtggttgggttagagcttggttttatacattttaggggggcagaagttataagcagacgtcaagcaatacgtgtaaggtgtacattggtttggtccagaaaggtgggacaacttgaagcagggggcttccaagtcataggtggattcaaaggttttctgattggcaattggttgaaagagttattatctaaagacctggaatgaatcgaaaggagtgctggggttgtggacaacagggttctgattatgtgggtgaaatctcttcagcagctgcccttagatgctatagatggcaaatgtttcctattcagacctttaaaaggtgccagaatcttagttaattctctcctggatcaggaaaaggcctggaagggaagggggattctctacacagcgtaaatttccccccacaagagaaagcattgcagggccatttcaaaatatttcaaagtgtcagacgtgttcaaaccagagcaactccatcttgggtgagggctaggaaaataaggctgggacttgctggtctgcattcccagaaagttaggtatttctagccgctagaggtttacggttaagggaacagactgagaaggtttactaaacagatccagacttgggagtgtccagatatcccaatatcttgagaataaaggcattcctaattttgctttaagtataataatattgattcttgcaaaatatggtaattaagaaaattaatcctttactacaaacccttgtaacagagcacatctccccatgacctttttttatcctatatacatacacacacgagcattgtacctagggtggacacgtttcctcctcttacttttggaaatgcccgactccgtctaaggagtagctgcactttcaacactttactttcttaataaacttgcttttgctttgcattgtggacttgccctgaattctttcttgtgggagatccaagaaccctctctgggggtcgggatcgggactcctttcctgtaacaaaaggagtacattttgtggtaaaatactgcaggttctttcagggcccgctatctgtcatgcgatgctgcactagagtcaggttggaatttggtctcttactgctacaaagggtctgctctgtcagaatctctggtcaattgtgcctgaattccaaagggaggagggtatcatgagacatgtctgactcaacttcccctcatggcctgaattagttttccaggcttctttggaatgtcttaggccaagagaggggtccatcagtcagttgagtggggaagggtagaagtttatttcttgttgacattacctaatcagaggcaaggaacagttttaatgttatctaatcaatcataagtcgaacagcaggaggtcagagggtctgtctttggctttgtcagctgcatatacatggggcccgggtaatcctgtctgaacagagcaacattcaaataaaattcatccagcaactgagaataactgaatatggaatgtaaatctttactggaattttaacagagaaacccaaagggccaatgcaaaaaccatggcccaccttgagaagagcaaatcctttttctctgcctcttgccccatcaccagccctgctggcctgacccctggctttccctccatctcgtgcccacggttcccccatccagcccagcctcttgctttctccatccctgcctgcccttattgtcaatgtcaagttcccaccatcctgcttttgcttgctttaaattcagcagctcttttcccgcatgattttaatgaatttatcaacttttgaaagaccaccatccccctccgctggccccaccaggtcttaaagatccaggctgagggtgcggaggggctgacaccccggatcttagtcattgttgttggctgtctttgcccttgttgcctgcctgtctttggggctaaggatgctaaatcgaggtgcaggtgttgctgcaagagtgtctgggccagctgtgggcactgcccgaactgaccttcagtctttctcacaatactttatggactctgcagtgtagaaaatcagtgagaggtttcctggggggatatgggttacagggaagcatttgtggccagggagcagctggtagacagtcaaaagcaacgatgacgtggtggccaggtgtgaaggtgaaaggcaggtgctcaggacctggctgcgggagggaagctggctggcctcggggcaggggtgctggtgaaggaggctgccgaaagccaagggccgtcagcttctccaactgcacaagctgatggaatgcatttgccgtgtgctatctggacataatctgtgcctgaagagcaaggatatttgatcgaaacccacttgtcctatgatggtgagctcctggtgtaaggacagcaggcatttagttgctgaattcactaattcatggcctccctgggccccaccgtgtttctgggcctgacacgtgggcagaccatctgtgatatggacagaggtgtgctgttgcattgctgacactctggaataagcttcctgggcagacggaggagagcaggagcaaaattccaccagaaggcttctgggaggctctctgccctggtgttcaataagcccagacgagggacccttgataagcatgctgttttgttggattgtagctgatgtttctcctggcagcctgaaagcgactggaataaacctgtccccaccccttctcaagagtgtggcagagtgtcactgtcctcttgctcgtctccgcatccattggcagtgcagcccttacagacttgtggccgtgcagactgggatgcgtgccattcagatttcctcttgccagtaactggcagctgccctgggtggccgggcagccagctcccctgcagatgccttttgataaagtgccactgtgagccagggtaccagggttctcccttcccaagcatgtgggtgctaagaggcgagatgtgctatgcagagaagcagcaggatcgcagaggcagccaatggagccttgcggaatgtctaccctgatggcattttatgccatggataaattaaaaacaagcttcctaattaagtgcttaatcgaatactcagcctcctgaggtgtgtacagaagaaacggaagatggcttttggcctccaggggctttcattaagcattccatatttcatcattttctcccgcttccttcactccccaaggccacggccatgtgtgctgcttccagacttctcagagggccttatgtatggtgagcccttaaacaagctgtgtgtggactaacgcatcatttcggattctatcatacatataaagagagctcgaggtgcctgagggattcttttagtgacaaagccagattatagccggttaggttcaagctgttctcgttttgctctcttcagctcatcctttcctcgtgttttgcccagcttgcttctgcagacagtgtgcagaaagctttaagggaaggtggcccggtgctgcatcctccattgcctataaatcttaccggccacagctctgccatcgtgcttcttctgcctctcagtcttcagcctgggatgggactcttggggtgggaggtgattggcttttgtccccctcccacatggcccttcccttgacctatgcacagttggtctgggctggtcccaccttttgacaaattcttgaagactgacctttccccaagcatactgtctgctccaaggttccacagctgctttgctgtgcatcaacatcatgctttagagcactggggaatgatgtttaacttgcaatctgcagccagagaggccccatttgctttgtcagtgcccactctcaccgcccttccaccatcaaggcccaaccagaaggcagggcatgtgttctctcctcccaccttgccctggacctggcatggtgctcttctcccagacaacactgagcacgtgttgaaatgaacatatcacctgcctccaagcaaaggcatagctgccacagttcagatacgtctgcaatgtgtatttcctaaaaccattattttcagcaaaagaaaatgtcaagaggaggatgtttaaatccttgtctaaatgtccaatccttagagaaaccagcttggataagttgctactgtttcagtgctgaattgttttgcaggatgagtaatgttaatcgtgtaacaataatgattgatatgctatctaaaacaatttgtatgacacatttgaataaaagtaatttgaaacaattcatagtggcattgttacactttccttgagctctgctgtcctggaaacctcatggttaagaagcccccgtcccctcccttatctttttgttccccaggaaaaggctcactgccaagatccaccctttcccatgcgacttacataaaactctggaatgccccttgtttatctgggataaggccaggcacagaccctcataaataattagctggactttgtccccactcctcaatctggacaaaacattcagtaacttgacttgcccaaccgtactcaggattctgtcccaccgccagatgcagacccatcctttctcatgtccactgagaatgttttctgctcaaccgtggggtcacgacaccggctcactcctcttaccataccctgttctttatagctgtgcctacccctccctatgaaagagaatccctttctttctggcctttgggacgcttgcaggtctgatggtcaaagcctcccccatgcagcagtccttcccccaatggcaatgttccttttggatacagtctctccttgcctaagtctgggtttggttttaatttgacaataggaatcttctatgtgtgtaagggatgtgtttctcagagatctccattttgaagtgtccagttggtgaagtcgtagttatattttcatgatctaagacagagacattttgtcttggtgagggttagaggcctccgccgtaagcaggcctgagataagagctgtgctgtacacaaggatgtgctggaaagccttgctgctcactcaccctgctgttatccacagctctggaaatgctgctgagccttcagcttcctctactctacttactgttatcaaactcagcaaggggcctccaagcttcttgcaggtctgctcctcggggagttaggtgggatggatgaggaggaataggactcatttcaggaggctggagactcgtgagacaagcatgggagcttctctcagatctgctgactgtgtagggacagagacagagcagggtgcaccttgggctcggccgacccagcctgtgcctatgcccagctctgctggtacacggggagcagagatcactgcttcttcaggcaggatctgaattaatctgctgattccagtcatcaggatcaatatttaataagcacttgttcacctgcttgtcctccccatgaggtccttagaaatcaaggaccatgtgtaactcaactctgcatttccagcacatggcaaaatgcccatacatacttgcactgcatgtacttttgttgactaaattgatgaattaggttaagtcacccttcacctctccttcttcttctctcctagtggagagatgaccagatgcacgagtggacccaggaaggctttgatgtccttccctgaccctcccaggggcgatggtcagggctgcagcctgtggctcccgggttgtgtctgaattgggaggacgggcacgggggctggcctctggtaaaaaatgtaggggaccttttgatctttttctgtccctccacagccaagaacactcaagctggccctgctggaaatagggagtcacacccaagcacagggctggtcacagatctcagaaatgccaaccttattggccttttattctaaacaacatttctgaaagcagcatatgggcacagcacactgtgctgtaagtcacgtctatggaagcagatgtaaatagcaaggccatttatcaacagaacagtttctcaagacaggaaagtggaagacaacatccaatttgttttattactcaatcacaaaaaataaccagtgtatagtcaaacatgtaccttaaacagtagtgtgctgagggaaatggcctgaaatgcaaatctcacctgtacctctgcacccctgagtcacgtcctctgctgacagtgatctctgagacatttgccaactctttgggagaagatggcttctgtagttgaggtaaaagagctcttcatgggtgcatggagggagatgaggaagatatgggatttatgcctgaggtagatccggttggaggtaagagaattcatgtgcttagaaatcattaatattggccaggcgctgtggctcacacctgtaatcccagcattttgggaggccaaggcgggtggatcagctgaggtcaggagttcaagacctgcctggccaatgtggtgaaaccccgtctctactaaaaatacaaaaattagccaggcatggtggtgggcgcctgtagttccagctactcgggaggctgaggcaggagaatcacttgaacccgggaggtggaggttgcagagagcagagatcatgccactgcactccagcctgggtgacagagtgagactctgtctcaaaaaaaaaaaaaaaaaaaaaaagaaagaaattattaatattatcattggtaagtgtaatgatcagcaggcagtcatgtcatcactgcttctccaaggaacaacttaaatctggaaataatagtcaagcactgctatcccttataaagacagggtgaccacgcaccgcaggatccttcctaggggtggagttgaccaaatcatgaggtagtcctctttcagtgttctccttaaaggatgctgcagcctggcaagggtctttaagaaatcatttcctatttatttttagggtttcccacttctcatttttcatcacgaaggtatctggaactaaagaaaactcaagtagttcatgttgacaggaaaaggcaaaagaggctccatgtgctagaagacgctggcgacctcactctgccctggttccgccactgagtcaacctcagacacactggtctctgtgcctcagggtcccacctgtagagcagaggcattggacaaggggatgctggactcttcttctagactgtcgatattaagttagatgcttaaccttgatgccttcatatttttaaataaacatttgtgtagatgtacaacacacataaaggaaattataaatatttccctagtgaattttcacaaaactcttacaacctagaaacccattccctgtatgctttctggaaatacggatttttagctccgtaggttagttgcgtttggcgtagagccttttttttttctgagaccgagtctcgctggagtgcggtggcgcgatctcggctcactgcaagctctgcctcccggattcaagccattctccagcctcagcctcccgagtagctgggactacaggcgcccaccaccatgcccggctaattttttgtatgtttagtagagacggggtttcaccgtgttagccaggatggtctcgatctcctgacctcgtgatctgcccgcctcggcctcccaaaatgctgggattacaggcatgagccaccgcgcccggcccggcgttgagcttcttataagtggaagcgcatcgtgtgattttgctgtgtgtcagtcttgttttgccccacacgatatttatgacactcatcggtggtcttggcacgtagcagagtttgctcattttgatccttcaggtattccattgtgtgaatgtgccgcagtttatttaccatctgtggttggttggtatttgggctgttttttgtttctaggtcttattaataattgtgctaggaacattcttgtgcatagtttttgctttgtttggtttttggtgtatttctggttgctatatatctaggaatgaaatttctctgccctagagtgagcaaaggttcaagattagtacatagttttctaaagagattatgttactttatactcccaccagtagaatattagattccatgtgctccctgtcctcagtagtaggtggtggtgtcagcattttgttattaggcattctggcgggtgtgtaacagcacttcaagacagtttcgatgtgcatttttctgatgactgatgatgttgagcatagcctcttttgtaaagtgtctgcccacaccttttgtccattctcctatgacgttgtctgacctttggctaatttgtgggagttctttcactactctggatcaatgactgccttgttactcttttaatggcatatttgatcgcaacaaaagttgttaattttaaggcagtccaatttatgaatctttcttcttatgattagtgctttttgtgtcctaagtaaggaatatttgctcacctcccaaaacatggtaatttcccattagctcttgtagaaattctactgtttgccttttatgtttagctccacaatccagctagtcttattatttttacgtatggtgtgagtaggagtcaagatagcatttttttggtatggatattcagttgacttttcatttaaaagactatctcttctctttctggtctagaacagactattctgttctattgacatattttgctatcctcaaaccgacactccctgttttaataactgcagttttatgatgtgtccagatatgctgaggtgtaagccttccaactttgtccttcattctcaagattgtactatttgcctttttcattttcataaataaatatattttgaatgtttcttatgaatttctataaacctacctgctatgattttgattacaattgcattgaatctacaaataaatttgagaagaatcatactcatgagcttttatttaggctttaagttctctgaagaatgatttgtagaagttctgtggggaggccatgcatatttttcactagatttattcctaataacttgatgttctttgaggctattgtaaatggtatcctttaaaaagtttcttttctaatttattattgctgacataaacaaaggtaattgatttttttgtatgtgttggccctctgtctacaaactaactttgctaaatttaattaataattcccacagtatgtctgaatgaactcttgtattttccacagaagtatgtcataataaataatggcattttaagtttctttttttccagtctattctcttatcccatttctcaaattattgcactggtcaggactagacatttctatatcatgcccaaattcatagtgaaagctttcaacatttcatagttcaatatgatgttggctgtgaattgctgtgtatttaacaggtaagaaacttccttctggggaggattttacaggaggtgggaacttgactctgttttctgtgacaacacttgaggccattatttctttgcttcaaccagatttatttgtaaacatactaatgggatttgctaattggaagataaccaggggcatttaggggttgttatgtaataagtccttttataagaatgcttttagcaggatagacctggtttttatttttctagccccaagagactactgaaaactccatgtagcttcctggcttctcagctactccattctgctctgtgtcctgcctttcagatgccaccttagagtccacaaataaactgaggaaaaagtgtcaggaagccctaggtgcctccccctactcttgaaatttggaatccttgaattctggtaatctgtttgttctcaacaaaaatattttgtccaacttttatattgttctctggggatagtccatcaggaataacttaatctgctattgcaagaagcaggagtaaattcttctgaaaatgcacattttagcatatgtaatacacaatttcaaaataataattttaatattttatgaatataacatgtacacttatagttatttttattattttattttttaattagcagatctaattttatatttatcatgtacagtatgatgctacaaactatatgtacattgtggattgactaaacctcactaattaccatatgtattaccttacatagttatcatttatgtggtgagaacacccaatgtccattctttttaccagtgagttttatactttcagatgttttcttgttactcattagcatccttttctttcagcttaaataactcctttgagcatttcttgaaagataggtctggtattgaactccctcagcttttgtctgggaaagtatctcacctcacctctatttctgaaagacagttttgctgtgtacaagattcttggttggcaggttttttgttttgtttttttgtttttttgttttgtttttttccttcagtacttttaatatagcatcttactgtcttggcctgtaaggtttctgctgagaaatctgctgctagccatattgtaactccttttattttatttgcttctttactcttgctactttcaggatcttgtctttgttttggtttttgacagtttgattataatatgtcctgggtttgtcttgctttgatggaatctaattggagatctttgaccttcctgtatctagttatttatatctttctctaggtttgaaaagttttccgctattatttctttaaatatcctttctaccttttctcttcctcctttttaactcctataacacaaacatttgctcttttgatgttgtcctataaattttgtaagctttcttcatgtcttttcattcttccctattttttcccctctgactatatattttcaaatgacttgtcttccagtttgaagattctttcttctgtttggtcaattccaacgttgatgctctctattgcattttttgtgtcattcattgtatttttcacctccaggatttctgcttgatttttaaaattatttcaatctgactgttaaatttctcattctggccacttaatattttcttcatttcactgatttttttttctcctgtattttcttgaagttcacaaagcttccttagtagttaattttaattctttgttaggtagttcatatatcttcatttttttaggctcagtcattggcactttattttgtccctttgatgatgtcatgtttccatgattgctcttcatccttgtggtcatatgttgatgtttgtgcatttcaagaagtaggagcttatttcagactttgcagacttactttctctggaaaagccgttcagcagtcaacctgtttagagattttgagctggttgtctggcatggttctgaagcctggggcagctagggccaatgtggtgtgggggtggacctgacttttggtgccactgtggccagtgtggtgccaggagacaatggaagcctaaggctgcaatggctgtcatggtgctggggcatgccccaaacccaggcctattataaccagcataatgctagggtgagctggaggtcgagcctgcctcacagccctgaagccccacacctggacaggtctggaagcttagtttgctggtactaacctggagtctgggtccatggggatctgtctggtgctgagttttaactatgacaggcccagtgctggggcctaaggcaaggtcctgtgctcactttcctctcattcccccaagaagacattatctcactccatcctgtgctgattgaggttgggaaaggcatgatgtgggtaatgtaaaactgtccttcctacccttttcaatgcattctttcttatgactgtgctacaaccaggtatcatgatctctcattttttttttttttttttttttgctcttgaaaaggtatttttgtgcatggatagttgttcaaattgatgtttctgcaatcactggagagtgattgcactattctgccattctgccatttggctccacttctctcatataatttttttttttttttttgagacagagcctcactctatctggagtgcagtggtgtaagcttggcccactgcgacctctgcctgccaggctcaagcaattctcctgcatcagcctcctgagtagctgggattacagtcgtgcaccactattcccagctaatttttgtatttttagtagagacggggtttcaccatgttggccaggctggtcttgaactcctgacctcatggtactcccaccatggcctctcaaagtgctgggattacaggtgtgagccactgtacctggcttctcatataattttaataatatactttaatatgtaatattttaaatgatattttaataagttaatactttgagtgaagttaaatgtacataaaatgtgatgatttaaaatggagacattcaattttatggctgtttttcattattaataaataaaaaattaattattaataaatgtttagtgaacacctactgcatatcacgcagctttagatgctcaggacacatcaatgagcaatacaaagacccctgcttgtattttcaggtgcagacacagagaatcacacactaaccctgtcagtttatgggaaatgctgggagggcctggagtggttctgatgggcacagccaactgagatggagaacagccctgttaggaagggtgggcaacatgaggccatgaggccatgagccagtttggctgagggaagagcatgctgggccgtgggtggctgacagactgacagcctgatgttcaggaggtaccagtgtgggcgggctggagacaggggagtgacagacctggggcagaggcagacaagcctgaagaccacaggggcggtgaaatgtgggcagtctgctggtttctattacaggaaggatgggaccttacttacattttcaaaggaaaaaaatattctatctgaaagaagatatgaactttaaaaaatccgaacatctgaatgtaaccatatctcatgtctcttgaaagtctagatgaaccaaacaaaattgaggtattttgatgatatttcaaccaaattggatcagttcaaaagaatgcaggcattcgtgaccagcctttcatgagagacgagtgctaatggatttgggggtcacaagagttctgcctctgagggtgctttttctttcttgtttttgcttttcgttacaaagttgtaattatcctttgccgcaattttctgtaatggacagatgaagaaggatgtaaatggtcagtgtgagaatataaatggcaatcaaattgagttcttcctgttgggcaaaaccaaagcaataaatatttccttataccctatttttgtaagttattatctccaaaagtcatgaatgggcttttagtttactaaaacatctgagggaggagaaatgcctgtttacatggtgtacccaggaggggcccacagaagacttgtgctagtgagcagagtgctatcctatcacagggccaccttggagatgtctgctgggaaccagtgtcacaagggagaacccagcctgcacagcaatacagcagcaaggacagacaccttgaggggcttgcacacccacacatgccctctctccaccctccacactctgctgccattcccttgaatgcaggggactctagtctctcttcttagttttcagctgtgaagtcttctgctggcagcccctaccatcctggttacctacctgggtcttccatcgtggctttgcgagcactgtgcctgctgtggtgggctggaccccacgggccaccttagatggtgccttctcaacagaggggctctcttccatgtctccgggccctccaggtctggtgtacaacaggtgctgaagatagaaaccaaccatacaccattagtgtgtttttggtccttcttcctccactttgagaagggaagatccccagccctggctattttcacaattttcatgcatgatggaattcattgttctcaaattcaggttcatattcattgttttcaagtataaattttggaggaagctctttcactctgaaatgaaaagtgaatactgtgtatggctgattggcacttgaaataaaaccatctcttgccagcaagcctgtgtctcattagcagacctactcactctacttcaagggcagctgtcaagagatcctgtcagaccctgggctgtggatacaatactccaggggtctcgcctgaaagctgagccaaaagtgattaagcctcttggcagtactggaatgggttccacatttttgcttattgatggcttaaatatatgaatgaatataggaacccacactggggatgctggtatgttaaacagtgttaacatatgcatcatctttaaatatgccctcagaattctctgcatctatttaaaggagattccttttttctctcctgtgaacacacggcacctgatgcctaaaccctgcctcattctcagaactgactgaagcccattcagctgaggtaatttaagtacacccccagggtcactgatggagcaggtacaagagagtgaagaatgaaagtataatgtttctgtaactcttcatacctcattaaatcaaagaaagatgtagttcaccatttctatctacaaatagcttaacattaacatcacaatgtattcatttcctttgaattctttttctccttttacatccaggctgaggccaaatcccacatatgagaaatctctacaactgccacaaaacaaaataccatcaacatttcattctccaaaagagatatgtaatttgaaatatatatatatgtcacagctaaaatggctgttcttgcttaatagtatttttatacaggtaattttctcactgagaactaataagtactataaattcgagatccattataattttatgacaaagtatatgagttttataagataacctttgaagactttgcatgcaaagccatcattgctttttgaattttaagagaatgttataatcaagtgcaaaattgaatgaaagtgaatatgcctgtgcaagctgtttgaaggtaacttacagccagtgtactaacagcctgtgacacagggttaagtcataggaactgagaatgccattctgcttactatgtggctacatttaggatgactttggctgcaagtaatagaaaacttaactttgatggatttcagaaataaaaaaaatttttaactcacttagggaaaatgctgagaaaacacaggctttagaattagttgatccatgcatagctgaaaaacagtctaaaactcactctgttgctcatcctgtgtgtcagtattctgctgcgtttaggcttggattgtttttggtgttgcccatcagttcagttctcaaagctcctgtgatataatttgaaaaaaaaacatatatatatatatatatatatatatatatatatatatatatatatttggtctttttctctggttcctggcatatagctcctaaaactcttgtaatctggagagtgttaacagtgttttttgcatgctaatgaggcaaatggtgacggagaccctagatagctgtaggatggaggctggctgccagcaacaccaaggcgtgattagagggttggagcttttagtccagcccccaaccttgggaatggggaggggtgggagattgagccaattaccaatggccagtgatttaatcaattatgcctacccagtgaaacctccataaaacccttaaacaacggggtttgcagaccttccagttggtatgcacattggcacacctgccgaggccagggaagttctgtgtaccctcctttcccagtgtcttgaactatgcatctcttccaacctgcagaggccagggaagctcggtgcacccctccttcccccaggaccttacactatgcatcccttccatttggctgttcctgacttgtatcctctataattaactggcaatgacatataaagtgttttcctgattctgtaagtcagtctagcaaattatcaaaccagaggaggagctgtgtgagcccccagtttttagtagattgattagaagcataggaggaccaggacttgagactggtatctgaagttggggtggtcttgagggactgagtccttaacctgtgaggtctgcattaactccaggtagttagtgttggaattgattgaattgttggacacctagttgttgtcagagagttaaataatttgttggtgttggaaaaagaaacaacccacatttttggtgccagaaatgtcacgagtacactagagtagaaacacagtagaaccccaatgtcatctattttttaagatgtcctttaatagaagtgtaaattatgaaacactaaatggctacactccagtttatagctcagtgaagttttacatttgtccatggtggtaggcagaataatgccccaacaaagaggtccacaatttaataacaaccatgagtccttaaacgcacagaagctagaggattttttcccgccataggcagagaaagtggcagcatgagaaggctgtgatgctccagttgctggttctgagaagtagggagaccctgttgttgagttctgccagcaattcaaacaggaaggaaagccatcctccttacagcctccagaaagaaatacagcctcccaacaccttgatttgagcctggtagtgtaacgaattgtggcaattccttatagtaacaatagaaggctaatacatatttttggaaccgggaagtgagatttgctgtaataaacatctaaaaatatgcaagtggctttgaaattggaaatagggagagactggaagaattttgagatgacaaaaagtctcaattgccttgagcagactattagtcaaaaaaaaaaaaaaaaaaaaaatagatgataatgacattgcccatgaggaaacagaagaaagtgagggatacaatagacaaacctaggtcaggcttagagaacatttaagttgccgtgaacagattgttggtagaaataatggacattaaaaacactgctggtgaggatgcagaagaaattagggaatgtggtattggatatggaggaaaagggggccaatagcagaaagcttacaggtcttgcaggcgtggaaagcagaacctgtaagtgatttccaagccaagcgttgaaagtgcagtctggcttcttcttgcagagtggaagagagaaaagttacattgagggaagaaccattaaataaaaagaaaccaggacttgatcgtttgaaaaactctcagtccttccaggttgtaaacgacactaaaattgagagatttattgtcagaaaagcatgttctagagaaaaggctgacggtatggctctacactttctggaaatatcttaggaagaccaaaaggtcagagtattctgtcacacaaaaggctctttgacggggtaaagaaagggactcacaaatgtcctggaaccagagagcctcttcctctttctaacaatgcccttaggaagctcaagggcattgttcctcagccatctccgcaaaggaaaagtagagatgggattacctggaaagatctgtgggcaagcctcttgtctaatgagtgaatccccatgatgtacgtgtgtgatccacgaggttcctgagaatttcatatcagcaggaacagtgccagcttgcgccgaaagggatggaaagagcaaaaatgaaagaaggctgatggacccccaaaattctactggcaggaaacaggctgataaaacgactcagctctgcagctcatttagaaaaaaaaaagggggtaagatgatttagagggtagagctgagagctacagaggatttttttttcttgcctcaaaacctaatggagttttcccttcttgatttcaaaactgcttgagaccagtctttccttctgtttctgaaaggaaatgtctacgactgtcccaccattgtattttggaaacaaaacacttgtttctttggattcacagcttcacagatgaaggggaattttgctccaggatggattattgtcagagtcctacccttgcctgatttagatgatattttgggcttttaaactggtgagatttaatgagataatggacttggagttgctatgatgaattgagatttttggagaccttaagaggaggtgaatgcctttggcgtgtgtgagagacatacacctttggaagccagactgcaggctggcatagcttcatccccaaagatgtccatgtcctcgtgccagggcctgtgaatacgttgtcttaaacagcaaaggagactttgcagatgtgtttaaagtaaggatattgaattggggaggacactctccgtttgggtgtgggtctcattggtgtcatccggttctactcctactggagccccactacctctcccctgtggtggtgcctgcaggacactgccctggtgtggccttcatggcaggccatgatcgtttagaatactcacttcactgtctgcagatgaattcatttcttggtgttgtcttttagtcaagctgttagcctgagtgctggatgattttacgtgccttcattgtccttctgagtatttttgggaagatgtaaggatatattctaacttaatgagctgagccgatgttaccttgtaggacctgcatctgggtgctgtttttaagcctaaaatctccgtgctttacactcctgcccctgcaccttcggtgttctcttcccactccatggcaatccctttgatgagagggtaacatctgtgatcacatctctgaagctggcctcattctcactggttggaatcacagtttttttccaggttaaagttaccacttctgtaacagctttagtgtgagtgacaaaagcagtaactgttgctgccctgtgaggccctaaattcctagactctcagttgatgtacaggcagctgtagggaggctctcatcctcaaggagactgtaccactccctgctctgctccagcctgagctcaattctctcttcagactttgcagagcggagaggtgtagctgagacaccaccacatgcctcattttcccatccttttccctagagttagaagctttgttgcacatggtgcgccttctaacatctcatgcctgtgagctttgccctaatgatttgccacaacataactcgcatcacaagctttccagcttgcaaatgcctgtgtctttgctacttgcctttagactgccgagctgatgctgcagggtttagcttctgccatgtgcagcgctctgctttcaggaggcgcactcttcactgtttaagattcaggttcccctgcatgtaatggagatccatctcaacagtggctgagagagacgaagaacatttcttcttcatgcaattttctggaagcagacggccaagtgctggattcaccttcttctttttattttattttattttattatactttaagttctagggtacatgtgcacaacgtgcaggtttgttacatatgccctgtcccattcctccagcttttgctctggtctctcctcttcaggatgtccctagcaggacagaagtagcacaaatcacttcccttccactccgctgtcccaaccccatcacacatccatgtctggccacaggagagctggagaagattctctctatctccaggcccatgtgctgagcgaagcattgtggttccattacagtacaaccggagtcaggaaattgcagtctaatccggctgctgcctctttctttgtattgagaagactgttttcatgcagttttaaaccatttcttttttaacaagaggaagatgtgacaaagacagcattgggcccataaagtctaaactatttttatttatttatttatttatttatttatttatttatttattttttgagctggagtctcgctctgtcgcccaggctagagtgtagtggcatgatcttggctcactgcaacctctgcctctcagattagagcgattctcctgcctcagcctcccgagtagctgggactacaggcgtgtgccaccacgcccagctatttttttgtatttttggtatagacagggtttcaccatgttggccaggctggtctcaatctcctgccctcaggtgatccacccgccttaggctcccaaagtgctgggattacaggcatgagccactgtgcccagccaactatttattatctggtagttatgatctagtatcttattacagcaagagtttgcagacgccagctctagagagggcacagctgacagatgctggcagcttctgccaatgtgtgcattccacgcacccagcttaaccagaaggctgcatgaactttttttgagaactcaacccactctttttaagaaagcaaggaaaaaagctgaccctcttcaaataaaagacaaacagtgcctaccctctcctggccccaaaacctaagagaaggaagaccctgcaggcagaagctccagacaccctggagggagagctccattgttctctcttcccaagtgaaaagtaagggcctttaaagaagcttcagaacctccctgatctgtcctatttgtactttgctcccgtgttgagaaacgtaggtttttttgtttgttttgtttgtttttgtttgtcacggagtctcactcttgttgcccaggctggagtgcagtggcacaaccttggcccactacaacctccacctcctgggttcaagcaattctcctgcctcagcctcctgagtagctgggattataggcacccaccatcatgctcagctaatttttgtagagagggggtttcaccatgttggccaggctgatcttgaactcctgacctcaggtgatccacccaccttggcctcccaaagtgctgggattataggcgtgagccaccatgcccggtcaaggaaggtaggtcttggcctacagtctatgtcctgcagtgatgccaaatgcccatgttggcgtgtggtccagtaaagcaatagacaggcactagtaaaagtttagctgttggctcctgtatgtgtggcccttcgaggaatcaccttccgcggtgctcctctgtctcccactgcccactctgcggttgagcacttacctctggtgcctggtatttggactgttctccctttcctgatccctgatcttgcacttcaactctgcttcagagcagagttgaattggctgaaagcaagagcataagtcactgctacttacctcaaccaagagaacatatgactttttcacagaactctaggcagagacatcctggatttgaggaccacttctttcactagtcactcctggataacactgagttcctgattgactttatccaagcggcagttttctcatatgtaaattggggtaaaaaaaaaaaagcgtctctcacagaattgtgctttttcttgggaggcaggaaagaatcaggtatgtaatatttctaaacaataaacaagcaaaaagttttctcttccttgcagtcactgtaagactagggccctaaagcagtcagggttccggactctgatggaggtttctagaagcacagggcagctgggagggtactgtgcagtaatactgccagcaacattcgcatgaagcccctggggtcaggggcctgctgaggatgagctgtgtcccttcaaaaaagaaatgttgaagtcctaacccccaggacctcacaaagggacagtatttggagatagggtcttaaaaggggcaatcagttaaaatgaagtcattagagtggccctgcatccaacaggactgggtccttataccaaggggaagtgtggacacagagaccgatgtgcacagaggggtgatgattaaggccaccaggagtgcctcacctacaagccaggggcaaaagggagaggcccggggctaactctccctcacagcccgggtaggaaccacctctgccgacaccctgatctcagccttccagcctccagaattgtgagacaataaaagtcggctgtatgactcccccagtctgcagtatcttgttacagcagccctggcagacagacacctgcacatttaaaacatgacccatgctgaggcagatagagccctctagaaagcctttggccacctctgcctgtgattccagctgcaatatccccagagatcatccaagtcacgtggttcatgatgcctagttacagcagccccaggaaatgaacacagggtcccactgggacataggagctgacggcagggctgctgggaagaggcaagcgttgaagaggaggcattgtgaggaggaggttgtgcacgcagaagggagctgtgtgaggctgtgtcctggttttggttataaacatgcaatttcccatattctgcacctgagatgtcccttctagaccaaggctttcagaatttactgtgaacaagcacctcaagattctattgcatccaaaatgttgacaagactggactcaggtttagtcgctgtgacaggatttctggactaatgagggaggggactatctactcaccaaggatgggcggaggcaaagaggaaaatgtgaatgagagattgaagccgcccaggaagtcagctacgcccctcttgctcctccctgggtgcccatctctgacctgcccccaggtcggttcttcacactgattccctcttctctgccttcttggtggtggtgggggtgcccttctgtctctcggtcaggtcagagtgatgtggcctctcctgcactcctgggcaggtttagcatctgtgaggatgtggtttgtggggcactgattatgatttctaagaggacgaaaggagaccttggactcacacagcagtgctcatagcacgtgtgtttgtgcgtgcacacgtcatttgttagccatttattaaataaatattaattgcactcctactatgctccaggcattattctacgcaaggtggaaacaatagggaaaaaaaagttcctgctctttgaagtgggggggcagaggaggatagaccattataaaaacacatgtaggcataatattttaggtgctcataagggctgtgaaatataaaacaggggccaggcgcggtggcttatgcttgtaatcccaacactttgggagggtgaggcgggcggatcacctgaggtcagtagtttgagaccagcctggccaacatggtgaaaccccatctctactaaaaatacaaaaaattagccaggcatggtggtgcatgcctgtagtcccagctactcgggaggctgaggcaggagaatcgcttgagtcaggcaagtggaggttgcaaagagtcaagatcacgccactggactccagcctgggcaacagagagagactcagccaaagaaagaaagaaagagagaaagagagaaagagagagagagagagaaagagagagagaaagagagagagagagagagagaaagaaagaaaagaaagaaaggaaggaaagaagaagaaagaagaaagaaagaaagaagaaagagagaaagaaaggaaggaagagaaagagagagaaagaaagaaagaaaagaaaggaaagaaagagagaaaagaaggaaggaaggaaaggaaggaagggaggaaggaagggaaagaaggaaagaaatataaaacaggttaaggagataaaaggtgatagagagggagtggggacatcacagttaggatcctgtgggtttcccataaatactaaaagaaatgtaagcaagtattagatggccactgctacactgaaccagattgcccatacctgccttgggtgcaggagagaggcacacagccacaaggctgccaggtgtgcagaaggaaaaggcgatctggcattttggtaacctccactcagtcatgaaaaccttggcacgtgatctctgactgagcagttcaaatccaagaactgatactgagaaaatgcccccggatatttgcaaagactgatgtgctagggtattcacagtctctttatttaccacagaaaaatagaatacacgacccggtctaagcgtagaggccagtacggcggatacagcagatgctttcactgaacggcacacattcttgcatccctactgagtttcagtaactacttgattcatggaattaaatactccacaattatgctgaataagttcatttaatgacatgggcaaatgtccacgcagcattaagttgaaagggctggtgaaattattatagcacagatcttgcaatagatacaaatgtgtctccatcaattttagaagaaatatcagttgcagagacacagaggtcatctcttggatttttaaaaagtgggtgtgtagatagaaggatattttcttcttgtcactttttcccccaccatattttctctaaagaacacattacctttttgatgaaaatataaaaacaaaaaagattctatggctttaaacaagagagtaagaattttataaataaataaaatttttgtcatttccacttacagatctgtgtaaattacaaaagaataccacacaaacataaaccatgtttgtttgggactaatgcaacttgaatttatagttgaggaatgtgataattgtcctttgaaaatactgattatactttaatttctatccagttttcacaaatcactttattacgtgaaggtagtaaaggagtagtatttaactttcattacagtgaagtgcagctgttgatgattaaaaagcaaaacaattttcttctatgatataattctatttttaatgttactcattaaaataatattgttcacttttcctcctgagttttctgtagtgtcacgtataatgtgatgtattaaaagtgcaaattacataattttcttgtggaggggtgcaggatctcactctgtcacccaggttgaaatgcagtgacacaatcatggctcactgcaacctctgcctcctgggctcgagcaatcctcttacctcagcctcccaaagtgctgggattacaggcctgagcaccgcacctggctgcaaattacgttatttgttaataaatggatttgaaatcagaaaattctttaaagaagcgaaatttaaaactaaataaaaactctctgaagttcccagaatcaactaacaaagagcacaacacaagtatttaaagtattaaagccagtcagtaaccataaaggtagccgcgcagtgccaagtgtcactagaatgcatgccagctgctgaggacagcaggtgaaatgtggcttccagctccgtcctgctcatcatgttcatgaactcacgcaggagcttcccaggggctttgaagggactcagcctcaggattcgcatgctcctttctttgggaagtaaatatggtatgtacaggttgcttgtcagaggtgatatggtgagtaagagtgtacttcttttacaattctattgaggtactattgctgtataataaactcatgtatgcacagtataccatttggtcaattgtgacatgtgtgtacacctgtgaaatgtcaccatcgtcaagatagcaaacaggtctgtcagcccccaaagcttccttgtgtcctcaggcaaccaaccactggtctaattttgccaccagaattttatattaataaaatgataagtatgcattcattttttgctcagcctagtggttttgagatccatctatgtttatatatatgtatatatataaaaacatacatatgtagatgaatatatttatacagcttcttcatagatgaatctatacataaacatataaaaatgcatatatatataaacagatgaatttcaaaattactaggctgagcaaaaaataaatgcatatatataacataatatataaacatatatattatatatatatttctgtgacgcttgtttgttctgccttatttctcccccgattgctaagtccctccctgtctcccacccctgttctttctctctcccctaagtagtattctaatgaatggatagatcacaatttgcttattcattcactcttaatggacgtttggatttttatcttgtttcagactattacaaaggaggatgcgatggaatgcatatttgtgtgcactatggtttgaatgtttgtccccccatcaagtcatgttaaaacctaatcttcattgtggcaatacttaatactttaattacctaactgtgctttttgttggttgattctgggatcctcagagagtttaaattttgttaagatgaaatgcagagggtgggaaatctataccagtatgtgagaggggaaggtttgggagagaatcagattagatggggccatgaaggtggggcattagcagctttataggaggagaaagagagacatgagtgacatggtcagtcctcttgtcctgtgatgcctcctgccacatcatgatgcagcacagggcccctcaccaggagctgagcagatggggccacccaatcttgcacttcctatcctccagaactgtgagccaaaataaacctcttatcctaataaattactcactttgtggtattaagttatagcaatgcaaaatggactaagacagtgtggatatgtttccgtttgagtaaataccaagcaatagaatgatcaggctatggaaacagatatagtgcatgtctaactttttaagatattgctaaactgttttcaaattattgtacattccctgcagcatatatgtgtgtatgagtgtgcctacatgtacgtgcatgtatgtgtggatatatgtgttatgcactgaattgtggtcccccccgcaagttcgtatgttgaaaccctagcccccagtgggaaagcatttaggtatctggagctagaacctttaaaaaggtaactgaggttaaatgagggttaagtgtagagtcctaattaaatacgactggtgtccttttaggaagagagagagagagaccagggatgtactcgcacagagaaaagccctatgaggacgtggcaagaaggactgcaaggcaaggaaggaagacctaggagaaaccaaccctgaagacatcttcatcctggacttccagcatgttcaagatctcagacttgaactcagtgttctcaaggacattccagtgggtgtctattgcttgtctgcttgagcagtagtataggaattagccctctagttaaatcccaacatgctgtgaacccttgctcatgtcagaagttggggctgggccaatacaatacaatgtgaatgacaatacaatacaatgtgaatgcagtacaatgcaatacaatgtgaatgacacacactctttggtgagggggataaccccatactcatgcatttataatgtgattggaagggggagaatctctcccttttggtcatgttatttcctataaggactgttagaaaatacctattatgaggcactttctgtctagtggtccaggcatcttctggaatgagtgattttctttgccacctgcctataagaaggtgcccttcccaccacctctagttggtatcacctgacccatgactggggtgttgggcagagacaaggggtgggagcagtgaggagtgaatctgcagatagaatgattttcttccaggagagggaggaggatgggaaataaccaagaattccagttgctgcgagagggctcatgtctgtttagtctaaggaatatgttatcctgtttgactcatgaggtagtaatacatcattgatcattgatcagtttaaatcctctctctagaagaaaggtgcaccttggcttctctgttgtcattttgcactacggagccagtacactcacacaagtgttggccagatgaggcctcttcctagcaggcctggagccatggcgaggctgcagggatgaccagggtaaacctgcacagagcagagcagtgattccactgcaaacctgaatgacgcacatcgctgtacctcctgctgtcaggaatttaactgctgtcagtgacagatcactaacttttgacctttgcttgccatgttcttggggtcatcccataacaatctatatttcccaattgtttccatcctacttttggttggcctcacaggctcagctaactacggattaactgccacatgtaataactcaataccccttcactcaacattgactaagcattttctgtgtaattgctagccattgtcctgtttcccagaaaatagctagtttttaccctcaaagttgagtggaaaaagacaagatatcctctagccccatccttatcagcaaagctgataatgtctaccccaatgaaggtcatctgtcacagttagtgattgatgtggggtagaatgtcaatgtctaccctgatgaaggtcatccatcacagttactgattgatgtggtgccatcctttattttggtggcatccttcttctaggcctagctgtctgggaatgaggcatgagcctaccataacatcagacagtctttgttcacagatgaggaaacaatccccataaggtcagagcacatgttcaaaaatggaaagctttttaaatgtccaggagcaacttgttaacactatatggttttttgcttgttttaaagatgatattttaactgagtgaaagtaaaaatgccatatactaaagtatgtgggatgcagctaaagcagtgctgagagggaaatatatagcactaaaaggctacattagaaaacagaaaacatttcaaatcaatggtccaaattccaactttgagaaattagaaaaagaagagcaaaaaaattcaaagcatgcagaaggaaataaataatagatatcagggcaaatatcaataaaataaaaaatagaaagatggtataaaaatagaaagatggtagaggaaatcaataaaacaaaaacgaaatctagtctccaaaacagatcaataacattgataaacttttagcgagattgacaaagataaaaagatgacgcaaatcacaagtatcaggaattaaagcagagctagctctacagatcctgcagcaatccagatggtgatacaggaatgccatgaacaaccttcattcataaattcaacaactttaaggaagtgagtcagttctttgaaacgcaaaaattacccaaaaatcaaacaacatgaaatagaaatttgaaaaacctataaatttgtaattaaaaggctcttaaaaaggaaatcaccaggcccagatgatttcactggcaaattctgccaaatatttaatgaatactgaacaccagctgtccacagtcttttcaagaaagtagaagaggagggaatactttgcaaccacattacaaggccagtatttgcataataccaaaactagataaaaacagtacaggaaaactatagactgatatttctataaatttaaacacaaaaacactcaaaaaagattagcaaatagaatgtagcaatataaagaattatactccatgaccaaatggaatttattatagggatgaaaagtgaattagttcaatatttaaaattaatcagtgtagtctcctataccaacagcctaaagaagaaaagtaatatcaattaatattgaaataaaatcaattgatgcagaaaaatgcaacacccagtcatgataaaaatcagcaaagtagtaatggaagagaatggcctcaacttcataaagagactctacaaaaagtctgcagttaacactcaatgtgacaagactgaatggcttcctcctaagatcaaaaacaaagcaaggtgtctgctatcatcactcttattcaacatagtactgaacgttctgggcagtgaaataagtcaagaaaaaaacacttcatgcagattggaaaggaaaaaattaaactgtccttatttgcaaatgacatgagggtctgtagaaaaatcccaatctacaaaaacaaacacataaacaaacgatgaacctcttcaaactaataagtaagcttaacgaggctgtaggatttaagaggaacgaaaagcttaattgcatttttatatgctaatatatagaaactgagattaataatatattaccatttaaagttgctccaaagaaaattatgtactcaggtataaatctaacaaacacgtgcagaatctgtatgttgaaacttgaaaaattgatggtgaaagatatcaaatatcacttaaatgaatggagagacatgttaccatggagatggagaagaagggtggaggatggaagggagggtatggctaaaaacgagcacgaggaaaccctgtgggcatggcctagctctgtgacatgaccattgtgatggttacacaactctatgcatgggattaaactcacatagagtaagttatacacacacacgagtgcacacaacgctagtgaaatacaaattagatctgtggattgtattactgtcaaagtctaggtttcaatattgcactgtagtcataagatttgccctgggaaaatggagtaaaagattcccgggcatttctgtattatttttgcaacttcctcttaatctataatttcaaaataaaacgttaaaaatattaaacctgcgtgtatcagtacagagaggggaacacagacaaaggtaatacaatggaaagtttggaagcaggcctatggataatgccaatcagcaacagggcagtgctgccactgtacgttgacattcaacaaatgacgctgcaatagtcgattcctcgctgggactcaaaaggaaacggcatcctgacctcatgccttagagaaaaattaacctcacatagacccagtggataaaaccaaaatgttactttgataatcctttttaatctctcttttcattaaataccagagaaaaagttgtttgcttttcctggctgttcatgtaaacaaggcaagaaaccaagttcgaatttggtcctgtgtatcgtcaggtttcttttacattgtctgctttctattgtgtacctaaactaatttggattaagctacatgtaacagagacccacaatttcacaagttagacaagatagcagctttgtgtttcacgcattggtgcagaggtacctcaccctcggctgctgtggtgtcttgtccactgctaacatgtttccatctagcttccttatatgccagccttaaggcggctttctgcaatgcccatattccaaccacaaaggagaagagaaatgaccaacatgggatcgccttccttttctctatcgatatgactcatcccattggttggaatttagtcaacgaactcaccaaactgcaacggattctgggaaacagtcaatacaatgcttggtgtgcaccactaaaaatcgggaattctaacgctgtgaaactgaaaaagctgggcagggttaactggcagtcaaccacccagcaacaggaatgcacagcgcacccaagtggtcaggtttgctgggctcattccacgttcagtaataaaacctgccagggcacagtgaccaccaccaggtcgacttggagtgtcaacgcattgtccttttgcatccatctgttttttattagaacagtgggtttcaagacgttggttcccaatttcagctataccagcgtttaaacattcttaaagatataaatattgagtatctcttttttccctgcccccggtatgctgaataagaaagtctagccgtgggcctggaactggttccttgcggagggttcttgggttcacagacttcaagaacgaagccacgaaccctcgcagtgagtgttgcggttcttaaaaatggtgtgtcagtcgtttgttcctttcacatgtgtccggaatttcttccttctggtgggttcgtggtcttgcttacttcggaagtgaagccgcagaccctggccgtgttacagctcctaagggtggcgggtccggagttgttcatttttcccggtgagtttgttgtctctctgacgttaggaatgaagccacagacctttgccgtgttacagctcctaaaagtgtcacgtccagagttcgcttctctcgaggagttcgtggtcttcctgatttaggagtgaagccgcagactctcccagtgttacagcttttaacggaaatccgaacccaaaaagtgagaagcaagaagatctactgtgaaaaggaaaataagaaagattccacattccggaaaaaggattcgagcaagttgcgttgcagcccaggtggccttttattcccttatttggccccgcccacatcctgctgattggtccattttacagagtgctgattggtccattttacagagtgctgattggtccgtttttgcagagtgttgattggtgcatttacaaacttttagctagacacagagcgctgattggtgtgtttacaatcctttagctagacaaaaaagttctccaagtccccctgacccagaagcccagccagcttcacctctaagtggtggggctagagtttctccaaatcctccagatgattctaatttaagctaaaatttgagatccactataattacaaagtaaatcatgaaggaaagtgttaggggaaaaagagatttaggtttgtaggaattatgtagtggaattcttaaaaagtatagaaaatttaaatgtgattaaatgtgattctaaaagcaataaacgagattttttgaagagactggatgtgagcaattgaaaaaaattgtttatcactgcttactgggttatctgtattctcgtgaacctgtgacatccagaggtggcaaagccatgtccatactgttgttttcagtctccatagcacacagcacattgcctggcatgcagcaggcacacaataatgtgctagatgagtggatgaaagaggagaacagaaagtacatttttgtgtctttatcagggagacaatcatcattgtgtggccatgaattttaagcattagtaagtctaagaaggaaaaatatctgtgcttaagcttttattttatagcaatggtgacaggttttatatttaaacatatatagtacaagcagttgcccaaaagtttgattgcttgtcctactgaaaatatgtgcattattttttttattgctgcctgaattttagtggcttatacaatgcaaatttgttttcttaaagttaacgtggattagaagtccaacactggctgctccaggctaaaaccaaggtgttgacagagctgccttcctttcgggagatctagggaagaatccatttccttgcttattcaggttgctagcaaaattcagattcctgtggttgtagggtttagattcaagtttgcatgttgactgagagttggggccattgccagctttaaaggttccctgctttccttggctcatggcccctcctccatctttatagccagcaccagcaggctgcctcctcttccccgttacatcttaccttgaccactgctgagaaagactctcgccttctaaggacacatatgattaattgggcccacaaaaaaatcctgggccaggattttatatcctggatataaaatccaggataatatctcctcctcaaatctttaatcacatctgaaaatcctttttgctgcgtaaggtaacatattcacaaagcccaaggaggaagtcatggactcctctgaaggactattgtgactactgcagtctgtccgctagcctccaaatagtcacacctgtcccagttgcaaatatacatccacccagtcccaaggttccctgaagtcttatccaattaaaaaatcaactcaaaatctaaaaatattgtttaaatatcatcagctcaaaagtctcaggtatcattatctaaattgtctaaattaagtatgggtaaggatctggtatgatccatcttaggacaaaatttctttttatctgtgaaactgttaaactacagaaataagttatctgctccccaaatacagtaggataagggttatagacattgttattcaaagagggaggaaatggaagaaataaagaagtcattgggttcaaatccagccaaggaaaactccattatgtgtcaaggcttagaaataaccctgtgttcctcaagctccaccttttgagcctctgactccactctctacactctgagatctcccgtttgagttaatctttcttaatgaaaggtaacttacactctcagctgagtaattttatcatccagtttcttgcctgtggaatctggagagtccaagttattctctcatgttcaacagctttcttttcttttgtactctccccaaccctttcagtccaagctggcactgtttctgctgataaaaaattctcaggaaccgtgtgtgtcttttgtgtatatcatggtgattcactccattagacaagtggcgtgtccacaaatcttttctagataatttcatctcaatttttggtttttgtcaagatggccaagggacgatgttgttacatttcctagatgctctgtagcttgatttggggggtctgtgagtcctacccttaatgttttcaaagatcctttgtgtaactgaaaactgactttttgatcattcaaaggggtttactttaagccatttctctagagtatgctttcctgatagtaaatcttttaattttaatgcgtctcactgttcagacatgctgagaatttcccacaccatcaagttctagttcctttttgtttaatagctcttccttcaatttatctgtttcatcttgccttttactataagcagctagaaaaaaaacagaacacatctttaacattttgcctgaaaatctctcttctaaatatctaattttattgtttacaggttcttcttgtcacaaaactgtgacataattcagctaggcttttttccacttataagaagcattacctctcctccaatttccaatatatattctttacttccttctgagctcttaacaccagcacctttaatgtccattttttctatcaatggtctgttcatgcagatttaggtattctctaaggtgatttactttttttctataatgctcctcactttcttcttagccttcattggaagtatttaacattcatgaatagtttgtttaagacaacggaggctttttctattatgctcctcaaaattcttctcacctctgaccaatatccaattttaaatccacttctgtatagttaggtgtttgttacaggtgcattccatttccaggtaccatttccaggtaccaatagcctgtatgaatcttctattgctgccttgaaaaataaccacaaactaaatggcttaaaataacacaaattcattatctctcagttctgtggtcaaaagtccaatactggtcatatcaagctaaaatcagtgtgttggcagggttgcattcctttctggaggctcaaaagaaagatgtgatttttgattttttttttcttggcagaatttagttgcctgaagttgtaggactgagatacctcttttcttgttagctgtgagttgagggtcattccccatttccaaaggcttcatgtgattagattaggcccatccaggacaatccagaaaaattttcttcatataaaagcctgtaatcttaatcacaagagcaaatccctttgccaggtaacatattcacaggttctgggtattggggcatgaacatctttaagtggccattattctgccaaccacaatgcagtaggtaaacagtaggcatcacttctggagtcatgttagcaaaaatggcagagtgggtagctctaaggctagctagacccttcacagaaatgctgaaataatgagaaaatctgtgaggatctactttatccgaattctagaaaatggtcaaagatttacaccagccaagtttgttttattttctttttttgaggcaatataaaaacagtaggagagatttgtggcatttttattttcccttgttttacctccctccctagctggtcattgctcttgaagatggaagcccatgttttgactgtgggactctagtcattggtttcagaggaaacagagaagaacttttctcaaagaattatctttgtctgttttgatctgtctgggtgttacctgaaggaatgatgcaatgtgcttgtcttcgtttcgcttaacttggaactctctaagagcagaaaagtggctatgctgagagcattcctcaggaacattgaaaggcaagtgagccaccttctagtgacttgggaaaatactacatttcaggcaaacaaaagacataccaaaatcctgggatgaaaagcttaaaagagagattctttggcagattagagtattgaaaagcacctatgtattccagggtatttagaaagccacagcatgcccagggaaggaaataagctcagaaaagactcaagaagactctaaacctctacttctggctaacctttaaggctggtgtcagcaggtagtgaaggctaacacagaattgtaaatggctgggctcagcactgaaggagtgtccaataaagggccattctgcaaacactgtgagaggtttcttgtttttgcattttgttttctggctttaggcattcaaagaatctctgtcaaaaacactagctgactgcaagctagaggaacagagacatcagagaccacaaatggcaaagaatacagtctttatgtattagtccattttcccactgctataaagaactacctgagactgggtaatttataaagaaaaaggtttaattgactcacagttccacatggctggtccctgtccctccctcaacatgtggagattataattcgagatgagatttgggtggggacacagagccaaaccatatcactttataaaaatagtttagaaaagttatcaaacaattataacccaaaacaagcaacaaaaacaaaccctgaggagggggaagaaacttatttcctgagttaccgtattataatatttaaaaagtccagttttcaacaaaaagtatgaagcatacaaggaaacaggaaatcatgctctatttaggggaaacattaaaagaaattgttgtgaggaaacacagacattggacttactagaaataaactttaaatcaactgtcttaaatgctgaaagagctaagaaaatcatggacaaatagtaaaggaaataaagagactaatgtctcaatagatagatagaaactgtcaataaagacaagtggtaaaaaaagaaccagtcagaaattctggagctcaaaagccccataactgaaatgaaaattcactgcatacaggtaatgggagtatcaggagaagagaaagaattgtgaagaaagaatattggaagaaataatgctcaaaatttccaaacttgataaaagacatgcatttaaacatccaagaagctcaacaaactccaagaatgataaagagatccataactgggtattttatagttctgtcaaaagcaaaagacaaagagaatcttgaatgtcacatgagagaaatgaccagttacatacaagggatcctcaataacattaacagaaaaaaacatggaggccagatggcagtgtggtgatattatttaaagcattgagaggaaaaaataatctatcaactaagaatgttatatctagcaaaagtatacctcaaaagtgaaggagaacttaatactatcccagaaaaacaaaacctgagggaacttgttgctagtggacctgccttataagaaatgctacaaggagtacttgaggtgtaaaagaaaggctgctagttattagatgcttgagttactacacagtaactcaaatctatacaaagaaataaaaaagtctggtaaaggtcattacatagataaatataaaagctaacattattctggattgtagctcctctttgtttcctgtatgatttaaaggacacatttataaaacaataattataaatctttgctaatgggcacacaatgtataaagatgtaatttgtgacaatgacaacataaagggaaaggctgaagctgggtaggagcagatgggctgacaggtgctgaaggcttatatttaatgagatttagtacaaaactctgaagctttccagactcacaggggtgatattttgatgaagtaacaggagagagagggtgtttggcatctcctttagaagttatagcttatgacactgtcaaggcaaaaattgtacctgacaaagttataaaggcaagaactaatgtattcagattattgcagtgggaattgttcaaccccactgaaacaacagacaggagggtttgtaagtggacgacactactaggggaaggttgatcagtgggatgaagcctgcacactgagtgctgtcttgggtaatatgtaatatcttaatctcattcagaaatgtcttgggcagagtcctgtaacaatgaaggtagtggagcctggtccactctggccatgggtcaggctggcaaaggctaagaagtggttgtgggtgccacctggggcaggaggtggggtggagagtgccccagattcccacgctgggctggtggccatgctgaggagctggggctggcctgggcagaggatgactgggacctccttagtcttgagcagcccctctgccactttgaagaactttgcagtctttctccttagagtctgcatttccggaagtttaagggctgcccagaaagtctccttgcacccagcaataagctggcagagctgttcaagcagagaaccaggcaggggagcaaaagtggcttctctgctctttggaagcactggcagcacagctgtgccctgcagaagaagatgaagaatctcagacacataaaccttcattgccgtggcagaggatgaatctgaaagaggaaggtggagtgcgggtcacatttactctggctggccctaaccctccctccctggaagccagccatgtagctaggcaatcatccagacccactcagatggggtttccagcagtccctggtgttgccctggccattctctaatgccagctaatgaggggcagccagtggagcacatggactgaccctctgaattaactcaccactgggggacagcatctctggatgacctcatcaagcatttgagaacagtggcatgatcaagatgctgtgaaaatggtttgttatcatttattcaattagaaatgggcttccatgcttcaaacatttatatttagatataaaatttagcttccagaaataccctggtaaaaatgttatttcaatgcaaacttttttttttttttttttttttttttttttttgtaattcaagaaaccaagaaagataaaatcaggtcacagctgtctagggcactaaggaaactaatccaaataaaatctaccctgagctttcataaaaaaccaagggaggaggaggtttaactattacctaccaatattacaaacagcagtgcatgcatatattctccaaagacaggtagaatgttcaaatcagcattgtacatagtagcccagctagaaattgccaactgtccatccacagcagaatggataaataccgcatgaaacattcacacaatggaatagtgctgagtggtgaagataaatgacctgcaacaaagacacacaccaatatggatgaacctccgggcacaaatagcacctacggcacaattctatttacagaaactaagaaaagaggcacagctgaccccggatgttcaagtcagtagagagacagccaggctggtgtgcgcctgtgatctggaaggggaatggtgccaggtgggctgtttgtggagctgtacaagatgacctgtggtttgtgcatgtcctgcctcactaggaaggtgtagacagccacctggcaggtagtacagtgacagtctctgtgatctgggtgtgacagccacaacttctgaactcctgtctcatgtggtttcggttggtcacactgagatgcatgacagtccgcctagatttgattgtgaatagaaaataaggcacgagcaatgctacatgggggcaacattgcaggatggttttgcctgttcttcctacatttaatgctacacaaatgaaaacgttccatgtggaataacaaccagcatcgtgtccaactgagagtaattagatgggaggatgtctgccaggttcagagcagacaagtcttggtttccaaacctagaagtcaaatgaaaaacttccaggcctcaatgtgttgaactctgagaagaaatacattttcttttcttttaaaaaaaaattgtggtaaaatacagaaacatacagtttgccagtgtagccatttttcagttccgtggtattgagtacattcaggatgctgcgcaaccattaccgcacccgtctccagaacttctccatcttccccagcagaaaccccgaagaaaggcatttctatagccgtgcctcgttatccccttccccgacactctcagcagcctgtctgaaggaactttaaaggcaagtctctctcgagagcagtggaaagcattcattcaatcataagtgcattcattctcctactccgctggagaaggcattataggtcactatttatacagcttacaggcaacttcaaataagtgttgaataattgacgaaaattcattcagctattaaatagtttttatgtgtgttttaacttaaaaattattttgcatccactatcaaagccgataactgtggatggaaatttccagatagttactcgtgcttccattaaacctttgcagtactttttaggaaggaaaataattctgacaaattgcagtaatacaaatcataccttttattttatttttaaatctcagtcacaagaaataaataattttaaaaaaagaataagagttttcataagaagggtgccgtgaaaatcattccaggtagctcatgaacttctgcaggtggctggggcacaggcggtgggtgggccatcctcacagattagctgtcagaatgcgattaaaacataacccactctttgagaattgctcatgctggctggtagatttcccagttctttaaacctggtgaagggagcgcaccctgaggctggctaaaagctgggttgccaaggcaacaggcagcctccacggtcctactcctccatggagcctctccctaagccagcttaatacagtggaacactcggtttcctggtgccagcataggcatctctgtcctcctgaccagctgcatggaactggtgtttctcacaaagcatttggccaggaaaatgcagaccatggtgacaaggagttagagttagtttgacaggaagttagttcatgttctggccttaatgactctctaaagggatgtgtcagatttcatatcagacagaaggtagcttagaagagcttgtaggaggttgctatttaagcattaggaatggccagcccgtgggattcctggaggtttgtgtatctcgcttgcctgcacaaaaggctgttgggtccaccaggggctgtcttgtcctggcctgtcccggaggagacagtgaaagggcacccagaggggagcaaacaggcgacacttgtgcagagctgccccagcctcttctcgggcttctggaggtggtagggggggtgcctatttcaggaaacacgggctttgggcctgacagagggttccatcctcctgctgtgtatgattagtccattctcatgctgctacaaagaaatacccaagattgggtaatttataaaggaaagaggtttaattgactcatggttccacatggctggggatgcctctggacacgtacaatcatggcggaaggggaagcaaacaagtcttatagggcagcaggcgagagagtgaagggggaagagccccttataaaactatcagatcttgtgagaattcactcactaacaggagagcagcatgggggaaaccgcccccataatccaaccacttccctaccttgacacgtgtggattacaattcaagatgagatttgggtgtggacacagaaccaaaccatagccgtggttaactgcttagaatgcaaaaacaaaaacaaaaacaaacaaacaaaaaacattgagcacccacttcccgctgcaggctttctgtctgcatcttcccctccaaaatcccccaaacccagggaggcaggcgctcttactacctctacacatgaagaaagggaggctcagagagatgagacattctcaagtggcaagccagcagctgcatccaaggcttcctctccgaatctgccttcagcacctctcgccctctttctggccgtacgatctactggaagaagaaatatccctccccctccttgttccgcaccctcctccaggtactgtggtctggatctggagggaggaagtactcgaggggctgctccttggtgctgagctgtctctgctctcggtggaggagtccttcccagaacattctctgagggctctggagtctgttgtcactcaccttccttccgccctcatccacctgttccactacaacattcattgcgtgtgcttgcaatgaatgaggcttttagtgagataatgtttctcccgtaacccaaggcttaggtggagtaaagtcttggttccaagacaagacagaagagtcttaaggggaagggtcatgtcttatgtttatcttgcatccccaattctcaatgagttcattggcttggacaggccttgagaagaaagtccgtttttcacacagcccccaaatgtagcttacacccctgtggccatgaccagaggcagaggaaggccctgaggactctcctccccaggcttccaggtaggtggatctgggaggcctgagctgagggatgcatgcccagtcctcagccccttctcaagaaggctgtggtgaaaatcaaatgtgcaaagtgcacgaagtggaaaatccttactacaagtataaatagctaataattaggtggaaaatgttcttaagtctactccaaatagaaaagagggaagttttctcttatctgcagggcacagtgcctggtacccactaaacacttaatgaatgtcagcttcattcttctttctcccaactgaaatgtgtggcaatgatctaagggagggggaacatgatgggaggagagctggggccagggaagcagtggaagaggagaaaaagaataaagaagatgagacgattgccctttagagttaggggaagccttgggtgactcatcaatgttaaaagggccaaaatccaaatgggaggacgtcaacttgggattgtccgaggctcaaggcacagtggatggaacaaggtttggtgggtttcagctctagagcagcgtaacattcaccaaattaagtcactcaacctctgggggctttttgttttattcttcattttgaaaataacagtatctgccctgtgcacatcatagagctactctgagatgcctttttaacattttatgaaattggaagagatgataaaaaattatgatatgatctgttgttgggagagtaaacaaccgatggtttccagacaacgacttggcaaaatatattaaggcattgaaatatacatctcctttaacccagctaaccacttctgagaacttctcccgggaaatgatgagagggagctaaaggaattctgagcaaagatgctcacagccatatgtcagtaatagggaaaatctggaaataacacatgtctaacagaaatgtttcggtgctttagccagtaagcaactcttaaaatgataagtgcttactgaaagaaaaagacattcttcacatagggagttaaaaaagctttagaatcataagagtatcatttaatattttccaagcatattctgaaagaggggcttcacgatggccgactggagcatctggcgctcacctcctccacaaagaagaaccgaaatagcgagtggagaaccacactctgaagggataatctaagcgagaactctggaattcaactgagaagtaacaggcaacaccggaggcaagagaggagagggagatggtgcagcctgtcggccaggataggcggggaacctggaggggctccccagtgtggggaaagagtaagtcagagaccctcaggggtctgcatcccaccccagacccctgcagtcctagccagggcagaccccctaggccctcgcaggctgtggcactaatgcagggagctgcctggagaccgcacgatggcatggatccagagagggagctcacgctgcctcccacacaccctgagtcctaagcagcttcctcacaacgccattttgagcacacagcctggaccacactgcagccagcccagcagcccctgagctccacactggcagccgcattgacaaccccaccttgtagccaccaccattgctgcctactgcaactgagaacgaagcgcgtgccacttgcagccaccctgccgccccagtagtggggctgctgaacatttacaagcgcgctgaggacaggctatcctgcccacagctgctgaagagcatgctccccagctgcctgcccaaagctgctgctcccgaaagcagccccttcctccctccagcaacagggctgcagggcagctgcttccacctccaccagagcactgccctgggggcctggggatcacccagcccccgcctagcacagccagccctgcaagcaccaccgtggggacctgaggacaggcttgccctgaccacccccaccaaggaaaccagacccctatctcccaccacatagagaaatcaactcaagatggattaaagcctttaacataggacctattagaacaaaacaaacagaggaaacatttcaggatcttggtctcggccaaggttttatgtctaagacctcaaaagtatagtaatagaaacagaaacagacaaatgggactctatgaaactgaaaagcttttgcacagcaaaggaaacaacagaataaagagaagcctgttgaatgggagaaaatatttgtaaactattcatctgacaaaaaacgaatatctggaatatacaaaaaactctaacaattcaatgtaaaaaaaaaaaacccaaataatccaattaaaaagtgagcataggacatgaataaacatttctcaaaagaagacgtgcaaatgaccaacaggtatatgagaaacgctcaaagccagtaatcaccagggaaatgcaaatgaaaccaccatgagatgagatgtcatagtataccagtcagaatggctagcattaaaaagaaaaaaataacaagatactggcacagatttgaagaaaaactcttatccaatgttggtgggaggataagttagtacagctactatggaaaacagtaggaagatttctcaaaaaactaaaaatagatctaccctacgatccagcagccccacttctgggcatttacccaaaggaaaggacatcagtatatcataaaggataactgcatctccatgactatcacagcactattcacaacagcaaatatataggatcaacccaagtgtccaacaatgggtgaatgggtaaaaacatgtggaatactattcagccataaaaagtaatgaaatgctgtcgtttgcaggaacatgaatggaactggaagtcattatgctaagtgacataggccaggcacagacaggcaaataccacatgttctcactcacatataggagctaaaaaagttgatctcctggaggtagagagtaaaatgacagatactagaagctgagaagagtgtgtgagtgataaggatgaggacgagatacagagaggttggttaatgggtacaaacatacagtaaggtagaatgaataagttctaatgttcagtagccgagtagggtgactgtaggtaacaacaatggagtataagtttcaaaatagctagaagagagctcttaaagtgttcccaacacatggaaacgataaatacttgaggtgatggacatcctgagcaccctgactggatcattacacatcctaggcatgcagtcaaatatcacaggtacccaataaatatgtacaaacagtatgtatcaatagaaagtaaaaaaaaaaaataagaatttgaaggatatacctgaaaatattataatagtattcccctagttggaatgtgtgatcatacagatcttatatattttttgcaatgagtttatgtctttatttgggtagaaacgtatacagaaatatctctacaatatttctgttaaagtagacagccccacccagtaaggaattccctttctgctattccagatggacagttgtgtaggtaccttttaaaatcaccttctatgtcagggagctcccttcctcccagggcagcactctgttcccagaggtttcttccttgtcacctacatttgtagtctccctgtgttgccgtgcttccatctccctgacatactggtgctgctctgctatggctctgcctttcccccggctcctggcaggcaggcaggggtggctcgcccagcgtcacactgcaagctgacctctctgaccctcccagtctgtctctgtcaagctgagcttggacattgctttgagcacctgaagtcccttgactcattttatcctcagacctcatctgtgcagtcacatgctcaccagtggctgtccagccacagacagcttagccaccttgactgcagttttggggggagtcagaggcacatctggtccttcccaaagtctgtgcacaaagtagacctcctctggtgtgcctgtccccctggtccccatccttattgggtgtgcaccccattagcctccctcttccaccttctatatctagtcatccttcatccctcctcttttctcccacatgtatgttcttcccaggcatccataatctagtcaccgccctccattgctaataatctctctttcctctcaccagcaattagattaaaagaccagctgtccacacctggtcactctgatccactgtaatctggtttcagtctccagtatcctactgaagccagttaggtccttagtaaaggcatgtttcaatagatattcctagagagaacagggaagcttggtcaacggtgtgcaagtcctgtgtgagatgtgtgtccctgtattaggccattcctgcattgctgtaaggaaacacctgagactgggtaaaacagaaaggtttaattagcccacaattctgcaggctgtacaagcatggcacctgcatctgctcagcttccggggtggcctcagggaggttttagtcatggcagaaggtgaagcgggagcaggcacgtcacatggtgacagcaggagttacagagagagtgtgggcaggcgtcacacacttttaaacaaccagatcgcctgtgaactcactcatcaccaagcccatgtggtgctaagccattcctgagggctccaccctcatgacccaatacctcccccaccaaccccaggccccacctctaataataggaatcacatttcaacataagatttggtggggacacagacccaagccctctctccttggagatgtccagtgacatggcatactgagattattaggacgtcccgtccagaggaaatctgctaagctctgcgtgaccatttctcagctgaccttgtctacagagcactttcagccctcgggacatgcattgccatcatgcagatgggactgcccctcaggacccagcctgaagacagagctttggctgcaccagccccaccgtggacctctcctgcttcaagttttcttgctcctggggttgtccaatgaggtctccttcctctctcaagactcagctcacgtgtctcactctctgcgaggctgagcaggcgccttccctgggacatgcaccctttcttcatggagccctttgcttgagcccctgtgaccacagatggagctctccttggcaatgacccatgcttttgccctgaccctggctgccaggtagggatgcacagagaaccaccaagcatcctgtgcccgaccaataatgaatgcaggtgaaaaggtagaatgaaatggcagacgaccttagacagtgtgaggaagaaagccaatggagcgaaaggcactgggggattctactcctctccatgatgaccttcccagaggcttgtccccttcactttctgtcccccgtccttgggatggaacgcacgtatctgctttctggacacactcctctgtcaccgaccttaggtgcttgccctggtcttgcaggtgtgacatcaagtactggtgtgcctgcggacatctgaggtgatgggcagggagctgcccattttgcctgggttttccaggtcattgaaacacggggtctcattgtgtgtgtgtagtatgacttcctgatttacaaacccaactgcgtgtggaagggaggtcttaattctaatgggggtgggaacatcctaatggctgggtctgaggcttttgaacagattagcaaatacagctgggctctcagcctgcagacttttgaagcaccaggaaaaatcacacacccaccacaatatcaaaggtgcagaggaatcgcagcaagtctggtattgcttttgaaactcaggtttcctgcagtcctctggcagatgccgtggctgctctgcccaaaagagatgtcagctccctggagtgctgggtggcctgggtgtcacctgggcaaccagtactttctccacggcctgtatgaggagagcccggagcctgtgctggtggtggggaagtggagtgggggaggctggaagctcagcctccgcagagcctgtgtttttcatgtgggcgttctctcttatgataccctcttctttttctcaatgaatatttattaagcattgactggatgccaagtacagttctcggtgctgggtacacagctgtgaacaagacaagatgccgtcctcactgggcttctgttctgccgcgggagaacatgatccgtaaccaacaagtggagattgtgtgggctatttatgagaaacaacgtatttctaataaaatatgtttatatatatataagatatatgtttatatatataagatatatatttatttacatatcacagggacagggcaaaggagacaaaagtgactgcatttcctggtgatttataatttgcaaagacatttcactttgcagtgtctcctgacactgcatttatttctctgatctggaaactgccctcccaggtgcagacgtcacccttccttagggatatatgctgagctctgagcaccctggggcctctgtgggagcctgtccaggtctgtgttgttgggtgctgcagggctcacagcatttcgagggcaggacaggtgcacctttcattcactgggacatgaaggtaggtgggaggcctcttcgtgcttggggaggcacatgatcaagtgctgctggtccaggcatgggcacacagaggacgtggaggtggcacggggtgtggaggaggccactgaccctagctttgttggggtgctgcccaggttagtcagcgggagctttggggaagacaagatacctaaactggcagctcatcttgctttagaccagagtgagtctgtagctggatggcccaggataggtaaacaggaacagggcagccctcacaagtgcactctgctagacagcccagccatctctgggcaccagcgtgtggctctggcctcttgcctacctgcctaaagcctgccatcacctctctctctgtaacacctctgtgcactgtgcacttctccaaagccacaagaagagcctcttaatgctgagaggaaatagccagggcttttggaaaaggattcagcacatgttctctacccacatggctcctggccggtcccttcctgcgtgtcctggctcattgccatgactctctccacacctgcgtgggaaaagcactcagcaccgttttatcttataggagcattgagtgtgtttgtgtgtgtgcgccataccgtgtggcctgtgtgtacagtatatgtaagtgtgtgtgcagggcgtgtgcctgcagtgcatgtgcatgtggggtatatgtgtgtggggtgttcatatgtgttctatagtgtgaatctgtgtgtgtggtgttggtatgtggtatggtatgtgtgtgtagtgtgagtgtgtttgtatggtgtgtggtacaggtgtggggtatggactatctttgggctgtgatatggtgtctgtgtgtatgtgtgtgtgtggtgtggggcatacatgtgtgtgtggtgtggtatgagtatgcatttatgtgtggtatgtgtgttgtatgtgtgtgtagtgtggtgtgtggtatgtggtgtagtgagtgtgcatttgtgtggcatgtgtggtgtggtatatgagtgcatttgtatgtactgtgcatgtgtttgtggtgtgtggtgtgttgggggatgtatgtgcatttgggatgtgtgtcttggtgtttctggttgctggaatcagggaagccaagcgagagacattctgacatttccaaatggcagcagtgactggcttactaggcttcttccaacattcagaaagatgaaaagagaaaaactacactctgcaggccattgttggtcagaaacaatcccattcaaaccaattggttttgaagcattttgcttttctctcctataaaatcctctaattattttgagtgaacatctgttactttgtttgtatttcggttggactggaaggcagagtaagaatattcttttcaaatgactgtttcatagccaagcaaacatatagacagcctcaaagccagaaaaggtgaagaaacataaaatatgaagcttaaatggctaaaagagattgggattaaccaaagtagcatgtcaaacgatgggggagtcacagtcgtctgaaatcctcgaccacagccccaagtccgtggcgtttctcccccacgctcccctgcacgtgctgatttctgtagcttgggactccctgcgctctgttcctctcagcaggccccgctccgcctcctccctgcagccttcagctctataccctccgtgacactgactggccttggccccattaagcatcttgtggacctgtgcaggtggcttgtcataattccattatgtttatgagaactatggtttagtgtcagccctttcctattttcctttatctctataatttgaaacaatcagcaaagaaaagtgtctgcaaacaaacacacacagccgggcagtcacggtgaagcttcttgttgggaataatgctcaaaatcttaaggaaattgaacacttaaacaaaggattcttagcaaagcaattttacttctgtgcagaagaatgcttctctttggccagttgccatgagagcacacctgaacaaaggggcataagagccttcattcttgatgcaagtcctgcctctgtactttttcctcattggctggggttgggccgtacaatctaaactaatcttggttggctaaatacttgaacttttcttcagataaggtgggcatataagggagagaggggagaggggaagggatgtctgcaatgacctagagagctagtcttctttccaaataaggaaaggaatgtgagctggtactgataagcctgatactgtggcgtgtccgggcatgcaacaaaggcagaaaagagaaaaaggaaaaggggcggggtggtactatgaattaaagaataaaggattgatcaggctatttgaagagaaacctcatcatatcccacattcttaaaggggttgtgggccggcaagcagcgtgttccttgaccagctatggacagaagcaaaaactcaattgtcttagtttgttttcttttgctatattaggccactcttgcattgctataaagaaatacttgagactgggtaatttctaaagaaaagaggttgaattggctcacagttctgtaggattacaggaagcatggtgctggcatctgcttggcttctgatgataccccaggaagcttacaatcatggcggaaggtaaagggaaagctagcgtgtcacatggcaggagcaggaacaagtgagagagggtgggagatgccacacacacttttttttttttttttgagatgggtgttttttcactcttgttgcccaggctggagtgcaatggcgtgatctcagctcaccgcaacctctgcctcccaagttcaagcgattctcctgcctcagcctcccgagcagctgggattacaggcatgtgctaccacacctggataccatccacttttaaacaactagatctcatgagaactcactcactatcacaagaacagcaccaaaaggagtgtgctgaaccattcatgagaaatccatgctccaacccaatcacctccccccaggccccatctccaacactggggatcgcaattcatcatgagatttgggtggggatacatatctgaaatatatcagttgcttataacaatatctgagactgggtaatttataagaaaataaatttatttcttactgttctggaggccgggagttccatggttgaggggctgcctttggtaagggctccttgctgtggggactctccgcagtcttgagggggtgcagggtgtcatacgacacagggctaagtgtgctaggtagggtcttttttttcttcttcttataaagccccactttcatgataacccatcaatccactaacccattaatctgttaatccatcaatggattaatccatttgcaagaccagagccctcatgatccagtcacctctcaatactgccacattggggattaaattttaacatgagttttggaggggccaaacttgcaaaccatagcattgatcttcaggagacaatttgaggcaggaattggcactctctctatgaagggccagaaagcaaatattttaggctctgcagaccacacatgtctccatggtgaccattgattctgctgccacagtgagaaagcatcatagatgtaaatgaatgggtgtggacgtgttcttataaaactgtatttgacactgaagtttgaagttcatgtaatttttatgtgtcatgaagtattcttcttttgatggtttttcaaccatttgaaaatgtgaaaaccattcttagctcgaaactgcatgccaacagagaggggctggatttggccctgaggagacatttgctgtgcacactagagaagctgggaatgccttgcccgcagccctccccaggcggccctagcccctcatgggtaggggtgctttcttctcaggttccagacatacagagggcctcagtacatgttcagagaacacatgcgtgctgaaccctgagcctctcctgccttatctctccccaaccaggagcgatgcaccacctttccctcaagcaaccttcccttgttcttattttggccagccccttccctgtgggcacacatgcaggctttcaggctgtcctgtgggatcactgcaggctcagtgggctactcacttactgggcgtattagcctaggggaaaactttaattcaattacatttttgcttgtcttaacccaactgtagaaaccaaagttacacctgctccaggtaacatttgcattttagcaaatgtctttcaggccttcacatcggagctagtggccaggctaattaaggggtactttttgatagctttatccacccttacaaaaataagccgctgaaggtagctcctgaggcgtctagaaaggtaagctcttttagccattatacttggttcagtgctcttctaccaactggctggcagcaaagtgaaaatccaggtgctaattatagaccatttctatttctgctgccaagaaatggctcatcttttcacgcttcatgatgggagtgacggacaacaaaatattcctctccaaaatactggggatggttgagctaaaagggttgaggtgcaaggcacattctgccttttgctgtgctctctgcctttctcacctaaagtcaggcccctttgcaacacttgctcaccagctcagaaagaaagctcagagatggtggcgccagaggttctaggagcagacttcactctccccacaaatctaacttcttgcatcttcctccctttcgaaaacctggagcaacttttgtctttgtcttgttgctatataggagttagggctctttgttccaatactatttaagtaaagctccccgtccttgagagataagtactttttgaactctccagcatgatgggtgcagcgcccgttagtaagcttctgttggttttttgtatgttattccaactttcgttttcaggatagtgtctcaactaagaatgtaaaaagggaaggaaaagaaattatattttctcccctacaagagcatgggcttttctatagatatttggctaaaaaaaaaacccagataattccagctggtgtccagggtctttgaagcatcagtgaccaaacctgtggcaggtgcatctagtgccgtttcaactgtttctgatgaccaccctgtaagtgtcctgtgtaaaggtggaggcattgtctacatgtgaccagagctctcacacatgaacgagccagtgtattgacatgattcttatttatttctaaacaccattatgattctcctagagagaactgaacggagagcataggcagcatctacccaaagccacgacactctcatccactcacgtggatgggattgtgtctgtatgtgtgtgctaggatagtcccagctctctgccttttaactcaggggccaaaagtgtttcattcatcaggtgagaaagtgccaaatccttgaaacaaggtacacccatggccaatttccagacatttgtttaatgggatgctctctgttcctttttacattaagttattgttcatgagttgtttgtgtttccagtgtttgtcaaagattttacttatatgtagtccaattcctattagaaaggggaaggaatttgctcaggaaaacaccatggcgatgcttgggatgcagatgagctacaatggcacggtcagccacagaggaggtcagccacggaggaggtcagccatgaaagaggtcagcacataggaggtcagccacagaggaggtcagccacagaggaggtcagcacagaggaggtcagccacagaggagctcagccacataggaggttagtgacagaggaggtcagccgcagaggaggtcagcacagaggaggtcatccacagaggaggtcatccacagagaaggtcagccacagaggaggcaaatatatttctaggggaggaggggattgcagaattaatttattctgtaataaatcagaaattggagacagtggaagagagggaggaagagaaagagatgattaagagagttgaaatggcatttagaagaagtgtgaccagtgtgtaacatagaagaagtatgaccagtgtgtgatttaataggtatccccagctcccagatctgctgtaaagtataaaaattgactacatacatcaaggatttaggtgatttttcttgtgatggtgaaggggaaattaaataaaatcaaaggaaaggacagcattccacacctggtgagatagagcacagaagaggcagtgtgtggtcgagaactcggagggagttagtgggaggggaaactgcaagctgggtgtgtgcctggcatctaaaggtggagggaaagaggcccagattccaggtgctggccgaggatcacagcagagctggcattagcaatccacaggtgtgttgggaagagtggtgacatctttcccctgcagcgggagtgggccaaggaacccactgcctgtcttccactcccaggcagaggctgggcatttgctgggctgcgctttgggagcccctctctgctgtgagcttcctgacatcactgcatgagaaatgtcatccgtctcttctggaggagttaggcttggctgtctgaaaccatcctccccgacaggaggcagcattactattgggatgggccgggactgggcttgtttccttcctgcctccccagcttccttgctctcaggccccattctccaggctgctgtcttgcagctggtccaggccagggtattgcccaaggttggcaggggatcagctgtctctatgggaccctaggcacaggtgtgcagccagcacacctctatccatgtccctacccaaggcttgctcacctgggacaggtctgtccttccccaagtctgtgagaattaagaaatctcctaaacaagaaaaattcatcttggctagaggaagaggaatctgcacacctgagcaagcattctaactatctgagggggtaaagcacggatgaaatgaccaactgctattccaaatccacagaaaaggtagggcaaatgagtccaaaggcctgaaagaacaagccccagggcagaatgtgttgaccagaaaagtaattttgtactaagggaaggcctagagatcctttagaacaaagaagaagaacaattgccgtagtatgttctaagacgaagatgtgaaagtcttgagtattggagggcactttgcaagggcagggttgtcagtttcagtgtggtcctcatggcaggagatggccagaggagaagactcacagaacacagagcaagcgccatgcaggcacggagactgcacacactacagccccccacggaggacatctcccttgcttcctagctgggacatgattcctgcagactggaaatattttcaagaaacttaaggagtaacatatgaatgttgaaaaggctgcatctttgaatagctccaggtgacatgtgcagttgcaacttacattttctggtaagttacaggaacccagattgtatcgtgcctccatattctgtctgtattgttttagggttagtgcagcccgaggccatcatgaggcggattcctgggattcacttggttgtttattttattcactggcactgaatcccacttaaatgcataaaatcatcttgaaacctaactctcctttcctcaagcactccagtgaatttttctacttaaaattcatgaagtaagaatgaaaatggtgcattgcgtattgggagtgctcactgaagtctgagtggacacttgtagtcaagccagagaaaaattgggaagacaacgctgtgaccattgtggatgggaagccaacctatcagtcaatataagattggcaatgctgcggcaacaagcaacccaaacccagtggctccatggggaaaacaaaaggcatttctcacccaaacaaaagttgtgttgggtttgtgtgactctctaagatgctgttatctctgcagtgattcagtgaccctgttatgacattatccggaacatatgccttcctcagtcaatatggttggcaagagatggcatggacttgcaatctctatagttggcaagaactatgcagaaatgatgcacagtacttcggctcacaccttatctgtcaaagcaaatcatatgacacaacagagtctaaaagagggaaagaagaagagccttggcgtgtgcctggtgagcattacctgatgctggtgagcattagtgatgcctactgcacctcgataatacagagtcatgcttgggtgtaaaatgccatgcaatcctgataccactgtgtgaacttaggtcacttcagttcctaggatgctgagcagtatattgaagtgggcaagtcctaaactcggattgaagtagacgaaggaaaagtgatggctccatcatctatattaactgagagacttcaggcaagttacttaacttctctaggcttccatttctaaaatatgtaataaggatgataaaaatagcatttgctcctgagggttctcatgatgcttaaatgagatggcgtgtaatgccagccccactaccttcacccatctagccccaggtctctgtatagagtgatgcagctggttaggctctagcccagtgatttgtatttcacatctgttacttgagagacccgaactctaggaagaaccagaaataaattctgaaaaaggaccttcatactggaaaatagcaggtggcttttctagctgggaaatacatagacaaatagaaccacaatggaagatcactgggacagtcttggaatcttagactgtgaacccctgaaggacaagcttgtatccttagtatctacaggagtgtctggaactgggaggcccatatctgcctctgccctcgagtccctctctggacctactctgccttctcattctcctgttgacccaagtgttaaccaggaaacttaatttaataccactagatgctgaccataaagatagctggtttctattcttctaatgtggaacctgaattttgctcaccaaccagtcattgcttatggcagctataaacacttaaagcttttcacacacggcaaattcacccatttccaaggtgtttatatggacaccacgacatgccaggtgtgggctaggggctcatgacatggagcaaaatcaatgaccccacctcacggaattcacagcctgggggaggaagcaggtgtttaaatagaggataatacagacagagattgagaaattgtaactatgattctccagtctccagaactgtaagcaacacatttccgttgcttataagctgcccagcttatggaatttcgttataggaacccgaatggacacaagacacatataacactagatacagtgtgatttgattcagtagcatctagattcttctgatcaggcatgcctgataatgcacctgtacatcctgtaaactgtttctgacaatgagcctttaattcacacatatgcacgtgtttacaaattataaacatatgctattgtgaccagatttctcataagcaggaatgtcccactgagtgagtggtcttacctccctgggatccagcactccactctggagaacactcccctaatagtgtcctgcccaactccgtgttattaaactagatgggaggggagggcatctgcagggattctctggaaaagaggcagaagttggatttctctctgtgattcctgggctggccagaaaaggaaggacaagtagactcaatggtcagtaatggccaaagaccaaagttcagggatgtatgtgaggtccaagaccatgcttctggccagatgggaatgtggtggaggtccacactggtcatgctgtgtgctgagagccctgggctctgtggagagcaatggggtggccaggcagggggtggccagctccctgcactcttcccatcaaaacagtgtgtatcgattttacctgtcgaacgtctgcatttgatgcagttctccctggccagacacagtctaaagcccccgccccagctcttgcggctgcccctgtccacaccccctccagcctcccaaactcctccaagtcacgcccacctcacgaacactttgaggtgtttgagtgaattgactgaacctgcacccatgccaggtaggtctattgatcactccagttttactattccaagctcaacgcatctggcacactggaccaggggtaggagggtcagagggaagcccaggtcctcgtgctcttccagggagagcggggctgggtggcaggcctggcctcacagcaccctccacgctggcaggacctggccacaccccgtgtactggaaattcactgtaagggccaaaggaaaacttctgccctctgaaggttttctgaaaatcaactcacaaaagacagattagtagaagcaaagatctacaaaattttaacatgtacagcatggggagtctcaggagaatgatcccccagtaacccagcatgctgcaggaacctatttaccttttcttataggggaagggaagctgggggaatgaataggcgcaatactcagacaatgactcataagaacgagggttgttttatgcagataaattccttcagttagactctaagagcttccttcgggagaatagatggttaagtctgtctaggagcagggaggactcccagtctcttctcctttgatggttgatctttctaggttatttgataaatccctagggagggggtttaagacaattgcattgtttggaaagaagcttttttggtcaaataaagaaattgcagagggaggccctccctgtgcttagggatggaggaccagacaaggttagagggactttggttctgaggcagcttctaaggcctctcagtgtcaaagcactggtcctcagggaatcactttctcagcccaacactgccttggtggatatcctagctctgcttctcagtaactttctagcatctcacagtttatgaccggctatgagtggcctctgaaaacacattgaaagtgcatagagaagcccctcaaagccacctgcagtggacgctccactgcgtgccagtcttaggtgtcgctgcagaaaagcacaagaacttgagagccctgtacgctgacaagagtgattttcctcctggaataaaggatttcttaccgagagctagcagggcgatgtgagaaagcactatctgccaggtttgacagctaggtaatttcaaattggaatttcagatttggccttcacttgtctttcctttgaaatttccattgcatttcccagacatttattgagtccacttgtcagcttgggtgaaaaatactgcctacccatcactttctgatttttcctttcagccaagactgaatgccactaatgggccattacctgaaggtaccgtgaagggcgagcttgtccttgggaaataaacctctggtgtgaattattccacttgcatctgaccagcgtcaacactgatggcctgtggagtgggtaggtttgtatccactcaacagcctaattacattccataaatgttggtaacctttcctttgctatctccgcaaatgtaagtatctgtagttcctgtttctcttttcagcctacagaatattattattttttccctttctttacaagcaagagcacaaatgaatttactagagctgactggctccagttcctttggaacaaatgctaagcataacaggatcagacataaggaaaaaaatttaaaaggatgtttgatagaaatattttcaaaattatgctgtaaaaacctaggtggagttcatagttatggatataattttgtctgtagaggacaggatcaagttttacagatgtgttgatgaaaagattaaaactcagtaaaattgaagagatgtattctaagccaaatatgagtgacctgtggcctgtgatacagccctcaggagatgttgagaacacgtgcccaaggtggtcaggttacagctcggttttatatgctttaaagagacataaagcatcagtcagtacatgcaaggtgtatatcgatttggtctgaaaaggccggaaaaccggaagtggaggattccaggtcataggtagattcaaagattttctgattggcagttggttgaaacagttaaattattgtctaaagacttagaatcaatagaaaggaatgtctgggtcaagataaggggttgtggagaccaagggtttatcacgcagatgaagcctccaggtagcagacttcagagagagtagattgtgaatgtttcttatcagacttaaagagtctgtcctatcagtagttcaaaaaaggaggagggtataatgaggcatgtctggcttccccttccccttatgacctgaactagtttttcaggttaactttggaatgcccttggctgagaagaggggtctgttcctatcgggtggcttagaattttatttttggtttacagatgggacttaaacatatatacagaaaattggtctagcatatgactgtttactccaatgtcacctttattacatctcatgcaacaggaccttcttttgcagagcctaagctcagtccacagcagggcatgctgcatgatgcttggaagctggggggtgttgatttcaaagctgcttccaggagaaaaaccacttttatgggacagagtgtgagtattaggggaaagatgggtggaagtaggcacaaagaagaagacaggcaggcataggatacaggtgagggcttcgcagatgcacgtcaaccaggtgcaaagctggtgaactttgtacaggtctgccagctgaggccagggagttacagggagttaaatgtggggacacaggtgtacacacgggtttatgttctaaacctgagtttcttgcaggtaacagtttctatgaatatgctagcacttgggaaaaacaggaggtcatggtggattatatttgtagccagaatttcttgcaagtaatttagtttctaagaatacgtgcattaactttgaaataaaaactggggatacagatgaatatcatatactaagaaaacctcaggaatgagaatttttatctcttttcttccgtaggtccacctgctgttctttctcagagcagatgtcaaagcatcaaaacgagcaatgttgcgttagttgggggtggtttgcaccttctaaactgcctcgcttccgcctttccaccacctctttctaaagcctccctcccctcacacaaatagctggcttggtagttgataagtaaaaaacttgtagttaccttgaaattcataaagcagaggtgtcagagtttacaaaagaccataaaacatatggaaaattcctttgattcttgggacttgttatgctctatgaagttacctggaacactgcattggcccatactgaactattgcttcttagagaaacacagggtctggtgcctgcaagtctttggtcacagaattttgtcaagcagtcaatgcataaccgtttttgagtgtgtttctatggaaagacactatatttaacctagagatactgttgattcattaagattgagctcgcctccaacagcgctataacttgtgcctgcatgaagcttgtctgacacttgtattttttccatgaggcacataccaggcttgaacttaggaacgctagccagcacttcatccctatgtttggggccattttaaacagaaaaatcactaccaaaaagcacaaaagtgcgagaaacagggcaccacacagaccatggaaaagacatttgtttacagcaggagacaagaaagcaggccttgcgctgcctcagctgggaacttgcccactaggcaattcaaattctttgccactttgtgtgtgtcctcagaagactgtgaaagtgctgccagcattgatttttggggctacaaacacatcctagtgagcaggccaatttgcaaatatggagtctgaatatagtgcatatgactatatttattacttgctaccttagtctgagctgctatgacaaaatactgctataacaaaatacctgaggctgggtaatttgcaagaacagaaatgtatctctcacagctctgggggctgtaaagtctgagaagcaggtgctggaaggtttggtgtctggtgagggctgcttcatcgatggcctcctctctcagctgcatcctcacaggctggaaggtggaggggcagaaagggcctaagctggttccctccagctctttctaaaaaataagatgctaacacacgcagggcttaaaacctagatggcaggttgataggtatagcaaaccactgtggtacatgtatacctatgtaacaaacctgcacgttcagcacatgtacctcagaacttaaaagaaaaaataataaggtgctaatccatgtttgatggtagaatattcaagacttaatcacttccccaaaagccccacttcttaataccgccatgataggaattaagtttcaacctgactgatggaggggacaccatcactgaaaccaaagcacttgctaacaactgatcttcccaaagagtttccaagaatgtaagttctctcaagtgagatactcaacgcaaggtagtattttactttggatggggtggcctattttcatctctttttcagattagcaaattctattttagctctcataatttgaatgggagctgatccctcccagggtctcagtgattcagcctctttgccgcacactcatatttctggcctgaaattcttttgaggttgaagcggatagactaggtttcctctcttttgattgaaggatggaaaggctgatgacacacaggccaggtgacagcagagcagctcagcacaagggccgaggctggctgcagctctgacgggcatgttctggacttcagcaagtatggaacctccctgtgcctcagtttatacacttgtaaatgggtggataataatggcactgtcaatcaggaatccagactcaggtaaggagagactttatccaaaaggaccaatgccattgagggaggggctgttgctgtgggggatgcttcgtccatcagacctgcaagtgtggcaaaggccagaaagaaagggattttctttaataggaaggggtaggtatggctggaaagaacaggatatggtgggaggagtgagagggtgttgtgatcccacaatcgagcaggaaatgttctcagtgggcatgaaggagggtggttctgcctctgtgcctaggacagaatcctgactacagttggccaagtcaaattattggacattttgtccagattggtgagtggggacatagtccagctaatcatttatgagggtcttatcccagataaacaaaggggcatttgagagtctcagtgaagtcacatggggaagggtagatctttgcagtaagccagttcctgggaacaaaaggatgagggagaggccaggggacttcttaaccatgaggtttctaggagcgcagagaaaattcaaacttgtcattgcctaccttaaagggatgtttagaggatttaaaatggatacatgcaaaatgttcatatttctaggatatattaaattgatataagtgctagctcttattattattgctataatactaagaagcaaaggcatgcgtagatgagcaattccgacgggagcagtgcagcgggtgggaggaggggaccctccctgggggctgtggctcagacacgtgggtgagcaaatgcacaaccctgggacatgctgggatgtcatgagaactcactaatggtcatctgtaaaaaggtgctttgtgaatagactccactagacgggcactgctcactagaatattagcaaatccattgcaacgagctcactgctggggtcctgtctcttgtctacccgcccggccaaaacagcccctactgccccctggcggcaagcctgtgtacgaggtgtggggaggggaagccacaacaggtagcagttgggtcagggcacctacaagtcatttttattcttaaagctcatttaaagcatttatggtgttcattaaaatatattttgacagcctgggcaacatagcgagacttcatctctaataaaaataaaaaaaattaactcgatgtggtggtgcacgcctatagtcccagctgctcaggaggctgaggaaggaggatcacttgagcctggggatttgaagcttcagtgaactatgatcaggccactgcgctccagcctgggtaacagagcaagatgctctcaccccaccacctctctctctctcttctctttatatatatatgtgtgtatatatatatatgtgtgtgtgtgtgtgtgtatgtatgtgtatatatatatatatatatatataggctcaaattggagaagaaagtgctagaaatccacaccactttcttctaatggcattgcattttgagagagaatagaccagacacctagactttancaacattctcaaagaacaagccatggaaaggctgtgtgcggaggagaaaggacttctgtttgggttatattagtctattagaggtctgagcactgaacttataaaaacctgacttttgaactgaaaaaaagggagcttttatccattcacttccacaaaagtattgcctagggtaatctatgcaattcctgcaggataaagattagcctgtaggcccaattatcataaattcctattaccccaacagaaatgtgttgagtgcctattttgcaggcaaaacgtcttcccttctctccctggtgctgcgttcagcacagaacaaccgcatttggcagcttcactccgacagaggccagtggctccttagagagctgaggtgttccggaggcgcgtgcaccaagcttctgctattcacgctccttggttcctcggaaagagagcgttcggttggaggaatcagtgtgctttttgcttattgacagcctttcttctcttctgaatcactatttgaactgaaggtcattggaagacatgcttttgggagggatatttgtttggaaaaacagacatagctcaaaccctgcaggctctctgaatcttttggtctttgatgagcgggtggcctgccaggcagcgggtgttctggctgctgtgtttgtgccatttgtatttgatcagctgctggggcacttctccctctgactgtgtgt

SEQ ID NO: 226 - DNA, 40092 bp, Homo sapiens
  misc_feature (2543)..(2543): Marker 657  n = t or c
  misc_feature (4269)..(4269): Marker 701  n = a or g
  misc_feature (8298)..(8298): Marker 650 n = c or g
  misc_feature (11764)..(11764): Marker 674  n = c or t
  misc_feature (27427)..(27427): Marker 710  n =  g or t
  misc_feature (27585)..(27585): Marker 702  n = a or g
  misc_feature (28895)..(28895): n is a, c, g, or t
  misc_feature (29117)..(29117): Marker 632  n = a or c
  misc_feature (32086)..(32086): Marker 675  n = c or t
aaatgctttcagaaaaggaggaggcttaatcaatattggggggggggttattattagatatcacaaattgtcaggtctatctttatttgaaggtagaggtagcctcaagcactttagttgggtttgttaaacaagcaagcaaagcggaaactacagctaagcatcttctgaatgagatcatcatcactatagaagaacctatgtcaaagatcttcaactcaagaaggaacagtgaggattagttcctttattgtcagcgtcagaactgtggcttggccagcctcttctcttaggtaaggcatgagcaccctaggcttcttctgtgtatctcttgctgcttaaatgtgtctccattaggggtgtatatccttttcgaagtcttctatattgaagaaaagccaacagcacaaaaagaccaaccaaagccaccagtgttcccatgactactaagagagttgtgggccaacctggagtttcttcaactgaaactaaagcagaagagaagggtctacaatcaggattttcatcagctgaatactttcagaagagaaaaagagcaagcgcacttgcctttcacgtgctttttgttgataaagcaaaactactcatgctagactaaaatttatcttctcctttctcaccatttatcatatccacaattgtttttcttggggtagtcagaactggcatcccattacttaaatacagcttattgcattttaaaaatttgttacaataaatgcttatgccgaagaaaccttctaaggaagaatgtaactacttttctgagttagaaactcatttgtgaaagtgcatgctaaaatggcatctggggagctgcaaaatatacagcccttgggaagagaaattctgctattgtctctaccttttttatagaatgataaacctgtgagagggatcagactggctattacaccaggagacactcaataaccaagcagatgatatttatacccattcaaatagttgtgaataaaatgtaaatctcccacatgataaatccaatcttctactctcatatattttataagctctcttccacaaaattagtggatttcattttttggtttttttttttttttttttttttagataaagtctcgctctgtcgcccaggctggagtacagtggcatgatctcggctcactgcaacctctgcctcctgagttcaagcgattctcctgcctcagcctcccgagtagctgggattacaggcacccatcaccatgctcagataaattttgtatttttagtagagacagggtttcgccatgttggccaggctggtctgaaactcctgactgcagggaatccacctgcctcggcctcccaaagtgctgggattacaggtgtgagctactgcacctggccgaatttcatttttaatatacatatgcctatttttcatttattttaaaaattatattctccttggccaactgttcttaaattcagctcctctgaatttgttctataccttacactcacctaatataagattctctttctagtcctttttctgcaatcccatgggaggtcctgacctgtcctgatgggattcctccaagagggttttgatctgtctcctcctgattcaacccagcagcacctattgccaacttcatcttcttaaaacacatatatttttattctgccatttctttgttcaagaccaaaaaatggttgccttttgcttttgtccaaatcctcttagttttttaaaaaattatgttttagaaattgttgtaacatatatgtaacataaatttgaccaccttgaccatttttaaataggcagtgcagtggcattaagtacattcacattgttgtgcgaccatcgccaccatccattctcagaacctttatatcttgcaaaactgatacattgtgcccaccaaacagtaactccctattctcccctcccaacccctggtaaccaggggtctctatgaatttgactatctcatagtctaagtggagtcatgcagtatttgttcttatgtctggcttattaaacttagcttagtgtcctcaaagttcatccatgttgtggcatgtatcagaatctccttcctttttgaggctgaataatattccactgtatgtatgtaccacattttgtttattcattcatccactaacagacacttggtttgcatctaccttttggctattgtaagtaatgctgctatgaacatgggtgtgcaaatatctctgctggaccttgctttcagttcttttaggtataccagaagtataattgctgggtcatatggtaattatttgttccatttttttgaggaatccccatactgttttccatagtggctgcaccattttacattcccaccagcaatgcacaaggattccaatttctctacaccctcagcaacacttactattttctatttttttttgatagcagtcatcccaatgggtatgaggtggtatcttattggggtttctgcctggcatctaaggccctctgtacctaggctctttcataaatttgaacttaattngaggtaattctctgcccaagcgtcccactacagccaggcttgaaagactcaggtcaaagagagagagactgagctctgaaatcatcttgattgctttctaggctgagactttgggtaaataggctgtgtgatttttcaccttcttgattaagattttttaaattgttttgtttttgtttttttgggtttttttgaaacagggtctcactctgttgcccagactggagtgcagtggcacaaacagggctcactgtagcctctacatcctgggctcaagcgattcttccacctcagcctcccgagtggctgagactacaggcatgcaccactatgcccagctaatattatttgaattttagcagagataggtctcagtatgttgccaggctcctaacattctttaaatggtgtgtggagccatattggggcctgggccaaaaagaaaaacatgtgccctgtatatacttgtcaaaatatcctcccatatgttgaaccaagtgggaaaagttaataagaaatctacaatcttaaaacatgactttaaaaacagtaactaatgcaacatacacatagagtcccacgtagcccaatctgttggtagaccaatcaatgtcagccttcatgaacctatccatcgcaggtggtataggctaaatgggaaatgactgattcagttataagacgatgtgggtatgaaaaacaaacaaaagtctgcctttatttaaaattttgatgatgtattattcatggttaattttttgcattaattttgactttccaaaattttgtattatattattacttaccttgattactgagttttctggcctcctcttgaattttgtgctcaaggcaaatgttgtactttcctcaccctaatcccagccctgccctcaaggaataatctctaaatccagctagtccctgtacagtgtggctagttcatttttatttcattggttagaaatttcaaagaaccatagggaggttttttattaatccaataaactcagagagaattgtcaagtcaggtgtaaaagcagatagttcatttaataagatctatttaaaactttcagttttctaaaacaagagtcagctcattagtccctttctgatgtttaattggtagtttaaaggctcattttgctaaatacgtatatgctagaaaaatggtcaataaacttaactagacctgaaagcttcggctaaaggtcttggtttacattataaagaaagaaagcaagaaagctagcttctttagaagatgaatgaatcacccatttggaagttgtgttagttacctggcagatcgatggcatagctgtagccaagttggtctgaggttaaaaagagttcttcattagtcactggagggaagaaaggaaccatgttgtacatccgattgtgaccaataggggccagctcctgaggccaggcatctgcaggaggattaaatcttttcatccactcatcaaagatggcatcagtaaaggaatgaagaacctgcaaaacagttggacacagcatttaacataaatcagtctgttccgatcacaccaacctgactgttgctttctctaaagtggaataacttcttcttgacataggaacttctgtatacccatgtgtggaatacccccttctgtgtaccaccatgaggaagcccaaatcaactcatatagagtgactatgatggcgaggatcaagatttcgggaagaaaancagttaagttttcaacgatgtatgaatctctctctccaagcaggactataaacccctttgtcaagtgagcaaatgaaagttcatgttggatttaacattggttgcagattgaacatttgaggccttcaacatatatgtgttaattatgaaattcagaaaaaggcaagtatgataagatacatgttctagtattgagatgatttggtttaacaggagagaaagaaaaagttgtgtttacaggttgagtatctgaaatctgaaaatttaaaacctaaaatccccctaaacctgaaacttcttgagtgccaacatgacacttgaaggaaatgctcattggagcatttttgaattttttggatttgggattctcaactggtataatgcaagtattccgaaatctgaaaaaattcaaaatcccaaacacttctggtcccaagcatttcagataagtgatactcaatctgtatcaatattataatataaaggaacagtaaatttttctcaccaggaatactcttctgtctactcatttcataaactctcacttgaattcttgctgttatgccagcaaaagaaagtctaaaaaggtaatgtacaaagtgctcatttatgttttctcaaggaagccattaaagtccttttaaaatatagcaattactatatgttttgaaatattaacagcaaaatttccacattgatagccctgattttgtaacatgatacaagtttgagagttcagtcccaccttgatggcagttgttggagttccttgttccttcctggatggtaagttcaaggagctcaggggcagtgtccttttttcattccccctggatccccagagcttgtcaccccagggtgtctcatatggagaaagggaggtacttatttcagtaaatacttattcagtgtattcattcctccattcaccactgtaccttgtacctcatttatagcactgatcaaatgatactataacttgttatttatgtatctatgtcccctaacaagatcctaactccttaaggtctaagataaggacttttcacctttgaagtctcaggtttagtatacaacctggacagagtcaatgtttactaactatgtgtttgctgatgacagtgtcatgcagacactttgcatacagtgcaaagcttagcatacaacctggacagagtcaatatttactaagtatgtgttggctgatgacagtgtcatgcatctttatttacataaacagtttgtgcaaataaacagtgtctagggatatacaaaaatatattttccaaagaaggccacacaatgtttgtttcttgactaacatgcttttctagaatcttgccactccctcattgaaggttggcttcatctggccttcccttgaaacttggtgagtttctgactcttttataaccaataaaatgcaacagaagtgacattttgtgactttcaaggttaaatcataaagtgtattgcagttcctatcttgtgcctgagccctgaaccatcaaataagcagtccagctgtcctgaggcagccatgctgtgaagaagcccaaaccaactcatatagagtgaccatgatggcgaggctcaagatttcaggaagaaaaacagatagcgggccagtccacagctgttccaacacctatcaccatctgactgcagctgcactgaaagatgctaggctagaactgcctagtcaagcccttccaaaattcctgacccacagaaatggtaagaaatgaaatggtcaccttcaagccactgagtgtttgggtaatcgtaatctgttatgcagaaatggataaacacaacaaaggaaaaaaacctgagtagagcctcccaggctcatggttaccagcacatgcagggaagggagttccttggtcgctttctcttttctgttgagacacaaaatttaatagaaattttgtttgtagttcttacattctcagtgtgagctgaattgggacccgctgccccatgcagaagtggcccattcctggaggcaggggagaaactgtgggggggcggggtgaaatgggaagagccccattcttcctcagtgttggggggctagagatgccacccccttttcctggccccctctgggttccaggaaggagaacagatggaatgtcaggcctgagacttctcctccacactgctgccccctgggtgggagggtagctaagagatccagacagagaatgagaaggcagaggtggtgaaacggggatagtgacgcagcttgagatgaataaaacacagcctgtggagctgatgatccaggatcacagaggtctgtaaacctcaacagtggacaccaataacatggcactgagaaggtagggaagataatatatattaggtacctagtacacagcacctttcttgtaggaaatggttattcaatggttgttatcactatgactataccatcagtactattattattttaacttgggacaaggacttatggaagaagaatgatggaattcgcattttgcaggtgggtggggcctgcaagcacctctgaaatcacacacactgtacatatagccaatgaggagctgggcatttaggaatgcatgtggcacatgcctagcactttttgataagtaaattagtgagtatttattagtgtttgctcaattacccaaaatgacatattgaatcctcaaagcagcctgatttggtggatattatttgtttgctcaggctgctgtaacaaagtactacagactgggtggcttagacaacaggcatttgtcttacggttggagacagtgtctcgcttctaggcagctggaagtccaacaccaagatgtcagtggggctggttccttctaagcactgtgagggaaaatctgttccagacctcactcctaccttctcgggccttgctgacaatctttggcattccttgccttgtagatctctatcttcatcctcatgcagtgttctccctgtgtgcaggtgcctatgtccaaattttccctttttatagggacaccactcacactagattagggacctactctactccagtatgacattttatgttaataaactatatctgcagctatcctatttccaaacaaggtgacattctgagttattagctattaggactttgacatatgaattttgtgggggacaattcaacccataacattattaccctgttttacagatggggaataaaaggcacaaaagtgttaagtgacttgcctaaggtcacacagctaatatatggtagagtaagaatttgaacccaggaagtctggttctaaagtgagagttcctaatccacatactctacttcctctacaccaccggtccccaacctttttggcaccagggactggttttcgaggaagacaattttcacggaccagggggtggtggatgggaagggagatggtttcaggatgaaattgttccaccttggattatcagacattagttagattctcataaggagtgtgcaacctagggccctctcaggtgcagttcatgatagggtttgcactcttatgagaatctaatgctgctgatctgacaggaggcggagctcaagtgataatgctcaattgcttaccatccacctgctgtgtggcccagttcctaagaggccacagaccagcatgggcccatggcccaggggttggggacccctgctttacaccaccacactgtagtacaaccttcaggaccaactagaataagaaaaattgattttgaaggcatattctccaatcttaacaatgcagaaagaggatactttgacctatgagtcctaaaccaatcatgaacttttagatactgtctgagttcaagtcagggttcaaattgtgatgacagaaagagacaagagactatcaggacacaaggaagatgcagaatcagtgctgtaagaggcaaataacttatagaaagtatcagaattcaccaagggaaaaatgtaaataataaaggagaaggcaagatcctaaggcaattagtaatctggagagataaaanaataggggaaaataataaggaggaattgaaattgtagctctcaggagggctataaaacatacaataaatgctctagtaaggctgcacacagtggctcatgcctgtaatcccagcactttgggaagctgaggcaagaggatcacatgagcccaggagttcgagaccagccccagcaacagagtgagaccccatttctacaaaaatttaaaaattagctaggtgtgatagtgtgtgcctgtggtcccagctacttgaggctgagatgcgaggatcatttgagccctggaagtcaaggctgcagtgagctatgattgtgccactgcactccagcctgagtgacagagcgagatactgtctcaacaacaacaacaacaacaacaacaaagctctagtaagaactatatacagagtacccaaattatagaatgtaagtttttttgaaaagactggtacatgctgagaaaatgcaaagcatccaatgaacaaaatgctacaagcaataacatatctacaagctaaaaagagaagtagtacaatctacggaataggtagttttgttaaaattgtgggcattattcctcaataaggtaccttgaattgctcttgaaaaactaattgtatctttgttaaatacaagttaaaaatgttaaatacaagttaatatctctgtaaagggtcaaatgtcatttgagggtaggaaacaaaagcaaaagttaaatgaaagtgtatcattgggctgggcatggtggcccacacctgtaatcccagcactttgtgagactgaggtgggaggatcacccgaggtcaggagttcgagaccagcctagccaatatggtgaaaccccatctctactaaaaatacaaaacattagctgggtgtggtggcgtgcacctgtgatcccagctattcgggaggctgaggcaggagagtcacttgaactcgggaggtggaggctgcaatgagccaagaacgcaccactgcactccagcctggaccacagagtgagactccatctcaaaaaaaaaataataataataaataaataaatttgtatcattggtgcctttcatctgctcgagggctacatagctacgttttggtattagaaactgagtacttcagaaatgaggttccgaattttggcatataaacctattctgtcttgttccaacaaaatgaggataggtacagaaaaggaaaaaaaaaacaacactaaatttcaaagtagaggccataatggaaaaaaaaatgtgattacatgggctttcaaggtaaagatttttcatgtaacccatgcaggagaaagtaatcaaccaacaaatattgcacctgcaggcataaagaaaataaaatacaagaaagtgtgcattattttttcaagatcattggaggataaagttactatcaaagggccttagcttaaatgactataaatttggattcccaccacacagatgaaataagaaaagtttctgcatctagagaaagaaccatggaaatatgaggccggctgcaaagatgtgtgtgcatcattaaagaccagcacagtgtagctttcaccacttgagttcatgtgttactgcccagaaggcatcctttgtcatcagactggatcctattgtggtgacatgctattgctctggtcctctgagagtcagaactaagtgacaattcaaatgtgatcacttaaaagccacatgacagataaaagcacacacaggtccatatgggaactctaatttaaaacttaaagtagaaggtatacattaaaaggttggtttggactttttaaatgagagaattcctaatggtcattcctaaaaaatatatttcatcaggcttgctattttagggaaatatcttgtcttgttctaccaaagatttgaaaacaaatgtaattgggatgctggtttcacactgccctaaataggccatatgtaataggcatgaaatagttaaacaacacccaagcctttatttaattaactaagctctgccacaaggaggtgggtactacacagagagaatatttcagtgactgatgagaaacaatctcctatggactcaatgtgtgtgccctaccccgaacaaattcatattttgaaatcctaactcccagtgtgatggtaataggaaatggggcctttgggaaataattaagccataaggatggggttctcatgaatggaattagtgcccttaccaaagagacccagagagctcctccctttcagctacgtgaggacaagcaagaaaatggccgttatgagccaggaagaagttcctcaccacacgctgaatctgctaatgccttgatcttcaacttctcagcctccagaactgtgagaaataaatgttgtttaggccacccagtctctggtatttttgttttagcagcctgaatggactaggacacaaccacggaagagaaaaaaaaagatattggagcaataatagcatcttccaggcagggcgcagcaaggatggtgctataattttctctccctatatttccctatccattcttttatagcaccctgggcaggcaaaacagagagtatttctcaggcattttggaggagttatatcaggaacacattctcccacatagacttgtataatagccttgtatactatatgtgtgtaaaaatgtacacaatatacattgtatacaagctctaacagcacacatacaaaaaaaaatcgagagaattagaaatgctgattctaaacccttgaggaaaaaaagcttcttcttcaagaattaaactctgaacagatgcagaggactacagaaagactctgctaggtcaactttaaaagaagtgaccagttcaacatgcatcataagttgacattacggattggagaaagaaccaaggtgatgctagaagagattctagacagagactaagctacctctcaggccattcttgactaaacaatcatgaaaactctaggagagagttgctcaactcaatgctagaaccatcttagatttgtatgtaagttgtggtttgttattatattcatattttatcagaatgaattggatgtaattcataggtttagttcttctcaatatagtatgcatttatccttataaattctagagttgaagagaatccattcaggtgacatttagcacctgtgaaattaaagaaaacaagccagcccccagcctagtccatagaaacactgccaccctggggaaccagagaggggtccagccaccctctctgattcctcagctcttataaaactcatcaagatgttatgccacttaggaggtagtaactgtgtacctgctatttaaaaactagtattgaataagtaaatgtgacatttaaaaagcataaatacatgctcacaatgaaagcaatgactatcatttcaaaagctgtgcaaaattagtcagatctgcccttcaccaattagtgttaattcctattaatatgatctaangggacttaatttcctcagctatagtgaatgcaattgtgaagagactgagttaagaattgtctaaactgacaaaaggcaaaattgtagttgaaagattgaacacggggagatttttgaataggaaacttttcttataaatctctgctcagccatttactgattggtgtgaccttgacacatttcttagcctctctaaactgtattttccctgtgtttaaaacaaggagagtagtttactatatacagatttgttcatttaagaggtgagctttgcaagacatctcgcataggggccatcacagaatagatgtacaataataggacattctcctcacaaaaatgtacagaacatctactaagtgtcaggtactgttctagaggttgagtatgttttcagtgatcacattcattttccataaactaataaaacctacaaaatacatctttacatgaccagattattaggttttccaggaaaataaaatattaaaagaaaatgttgtattttgttactcacacagaggacgaattactttccctaattctgacttttttgaatatttagggttttttttttctttttccagaagtcatgatcacaaacaaaagttatgaagacagatcacagaaaaggaggtgcaaatggattttttctttttgaatgtctgaaaagatgctggacttcacttttttttttgagacagagtttcgctcttgtcacccaggctggagtgcgatggcacgatcttggctcactgcaacctccacctcccgggttcaagtgattctcctgcctcagcctcccaagcagctgagactacaggtgcctaacaccacacccggctaatttttgtatttttagtagagacaaggtttcaccatgttggccaggctggtcttgaactcctgacctcaggtaacccacccacctcagcctcccaaagtgctgggattacaggcgtgagccactgcatctggcctagacttcacttataagaagagaaatgcaaattaaaatttgctaaaatgccttttcacctatcacgttgacaaagatgaaaaagtgtgatgacacagggacaaagagcataatgagagggaatgatgggggaactgtggctctgacacataggtgacacacaggtattaggagggaatattgtccaaacttctagaggcaattctgtaacatttatcaaatttcaaatgcatttttttaccctttaagccagggattctattctctttacttaccttacatgttcaaggatgtttgttgtagcattgtaaagcaaacgattagaaatcacctaaatgtccatcaacagaaaatagtttaaaatcttaaatttaaaattaaaataatacatttcaggataaatccatgcaaaagaatactatacagctataaaaaaagaataagaatgcccttcagaactgaaatgatttggaataagttaaaaaaaaagtgggggaaaggcaaagggacagaggggtctataatatgctaccatgtagataaatatataaacatatttgtttgtgtatttataaaatatatctggaaaattagaaaaaaattgtattgtttgctggaagatggtagtgataatacggacttcattttatacattttatattttgaatcttttatgtgcactaagattttaagatgaaaaaatttagaaaactatgcaacaacctaaaaattaaataaattaagtgataatgggatattatacataataggtgccttatagagatggtcctctgaatccaattataagtaatctagacatgatttagagtatacagaaggatgtgcgtaccttatatgcaaatataatgccattttatataagggacttgagtagtcacagattttggtacccatggtggggggtcctggaactaattccctcaagatattgagggatgactataattgcaactgtataaaacatatgagaatatgaaaagaaataaacaaaaaaattgagatggaattacaggcatttaaaaactattttcaccaacatttctgtaattataaataatataaaaatcataaaccaataaaaataaaaatttcacatacaacaatgttattttatttttttacaatattagtctaattatgatttttcttatttaaagtaaagcaaaatggatctatctttaaatgtttcactcttgggaagaaaaaagcaatgccctattgatatggtttagctgtgttcccacccaaatctcatcttgaattgtagctcccacagttcccacatgttgtggaagggatgtaattgaatcatgggggtgggtctttcccatgctgttcttatgatagtgaataagtctcatgagatctgatggttttataaatgagagttttcctgcacaagttctctcttggctgccaccatgtaagatgtgcttttcaccttccaccatgatcgtgaggtctccccagccacatagaactgtaagtccattaaacctctttttctctataaattactcagtctcagatacatctttatcagcagcatgaaaacagactgatacacctatccttctttttttaaatttcaactaaactcactctaactcagaattatttatacctgtaattgtgagcttttgatttcactaactttgttgtagcctagaacagcagactcagaagggctctttcttacagggttaatttatggtagtccatcagctatgtgtggttttagaaattcattttctcctgctgcacattttctaaattaatgaacttattttatacactgattagtaataagactactgtatgttgtattccatttagaatgtcaacgtacaaggtagaaaacaggcacgagctgtttagtattaattatggaacctatggaccccccagccactgatgaattgaaggaacgtagaactcaccaaatgtactttctaaaaggataacatccaagtatactcttaagaatagtatctttaggaattgggaaggaaattaccactatgtaacacagtttctttcttggcatttaaataactttacagtctgttggtttccttttttttctcttttctggattatatctaaatttaatattgaagacagcacttagcatttctctggcctaatcttattttccatgataaatgtgtgcatttgcctcaattaccttaggaattactagagattgcttcagagtttttcctgcactttaatgttctgccttcttttgctcattattgtgatcacatacaattttgtagctctattgcttggagagatttcacaaaaaaaattttaataaatgtcatgtgcaatatatttgcatgaattgcctcatgaatttgaaattccagaagctataactctgttaactgaaatactttaacctggatctcaatatgtgaaaaatcatttaaggctgaattggcttcagcataaaactctttgaaaatagcctaaagtaatggtgagttctggaactaggcccaaaacattattcattctgtgcctttaaagaaacgctgtggctttttgtttatttatatgtatattacacatactactaaagaaaaataaaattttaacattaagcacattagaaacaacgaacacaaagatgattaaatgtcttatatctctgaaccacgggatttctcacccatcaagtcacaatgtgagcttccaccctaaagcagaaggagaaatatgactaaagggaaatccctactacaggccagatatggtgactcacccagtgctttgggaggccaaggtgggaggattgcttgaggctaggagttctgagaccagcctaggcaacatagtaagacctcatctctacaaaaataaaaaatttaaaaagctgagcatggtggtatgtggctatagtcctagctacttgggaggctgaggcaggaggatcacttgagcccagaagtttgaggctgccgtgagctatgattatgccactgcatttcagcctgggcaacagagagagactgtctcttagagagagagagagagagagagagagagagattcctactatccttactacaaactaatacaaagaagaaaagtgaatcctttacaccacaggttgataaattaaagcctgagggccaaatagagcctacaacctgtttttgtaaataacgttttattggaacaccacattcatttgtttatgcatgatctatggctgatttcatgatacaggggcagagttcagtagttacaacagaaaacatctggcctccaaagcccagaatatttgctacctggctatttacagaaaaatgttgccaatttctgtccacttagcaggcttgttcaaaagaaggagatacggtttagcaatcctggagacttgggatgcagaaaatcaaattactagcatcatttttaataggagagaaagagttggggtataatccttaatttatcagaggattccactgttctacttataacatattggagtactggataaggagtattatgacatttttccttatgaatatgaattgtgtgtataaattgtacagttgacaatgtatgctttaataaatacttagagacgtatagtataaatagatgtacagatacatggctgagaaagcagacaccagaaatgcttggcataagctatggctgagacgatagccagaaaaaatgatgtgaactatcaagttaaaatcattgaacaaagcaggcattctagagaaaagcaaagatcgctgtggcggcgtcacagataagcccccaccttgttagaggctgggaccattaattcagacttctgacaaccccttcatttattgctactatgcaaatatgaggaaagaaacattttttagaaggaaagaacaactctaccaactaattccgtctcaggatttcttgaagctcacctgactatgctttaatctatctaggagccccagaaagctacttcacacccatcaggcaagcttagaatcattgaaagctatacctttactctccctcttcatagctcctttttttgtaccctgggttgagtaacaataataaatcacctgtgaaatacttctgactttgtgcttattagtaaaatgtcttagggcattactgtctgctttggagaacaagataagaaatattaattaaggtttgaaaatctaaacctaacatatggttctctaattctgaccattataaaacacattattattgttatgataacatttgtattgtacttgacgggctctagaccagtttcctattgtcctaatctactaagagtcacttcactgagaacaacattttcaccaccagatcaggtcaagagacccacactttgcagagtgggaagcagaagctccatgtggttcaattacattcccaagattgccctggtctgtatcaagtaaaactgattgacttgtaatcagtcatgaagcctccaaaaagtccagaaaaacaaacttctggctgggtgcattggctcacgcctataatctcagcactttgagaggccgaggcccgaggatcacttgaggtcatgagttcaagaccagcctggccaacatggcaaaaccttgtctctactcaaaatacaaacattagccaggcgcagtggcacgtgcctgtaatcccagctactcgggaggctgaggcaggagaatcacttgaacgcaggaggcggaggttgcagtgggtcaaaattgcaccactgcatttcagcctggatgacagagagagactccgtctcaaaaagaaaaaagaaaagaaaaacaaacttctataaactgatggtttgacaatgcattataaatgctatatctggactgaactgtgtttccccaaaatctgtgtgttgaagccctaacccacaatgtgactatacttggagatagagcctagaaagaggtaattaaggtttaatgaggtcagaaccatagggccctggattagtgttatcataaaaggaggcatcagagagtttattctctctctccctccactatatgaggatgcagctagaaggctcaggaagagagtcttcaccaggaaccaaatcagctggcaccttggtcttagacctcctggcctctagaactgtgggatataaatttctgttgtttaagccatccaatctgtggtctttcattatggcagcctgagcagactaagacacattgctaagattaacattaaggtgaggaaaattctggagaaaaacagagagtctttggatatcacacaatctaactggataacaatataaactcaaaatactggcaaaataaaaaaggagaagaggtgaaatttcttcttgtaattgctccaaaactatctattcaagacatacaactcagaagacacacagacagggttaaaatagacgagggtgagttgcgtatctgtaaagcaggagcacttttggggattggctgctgagacatgaatgtgtatgttgtctaaatctcttatgacaacttgagtgacctgtacttagaaaagcagcccctgacattcaagagctggcctggcgctatcaacgaggacttgatgtccccctatcagacataaacgatttcgtagaacatcgacagcagacaaggccactctgtgaccatgacggatcaggacaaaaacaagaaaaccccataaccgtgtctgagcacagacaaattatgaacattgtccaagatgcaagatgcgtgacaccccctttcccggctaatatgagcatctgctgctgttttaccaattatggctttaacctcagtctagtctgccccatatacagacataatcactctatcaagatacccactcatagaatcaggaagcatacccctgcttcctgacaacatctgattcagagcaaagcttccaaaagtcctccccaaatcacctagcacaagcccaaaccctttctgtcttttccaacacccactggctgagactttccacagtcctccattctctgcctgcaaggagtaacagaccaatgtattcaactacattgtgttcctagaggtcacagactgaagagcattgactagggtagctgaacagtgtagccctgactcgtatttccccattttgtttgtcttagaaaagttcaccaggggatgaatatactttaaaaactaaagactgggcccagtggttcacgcctgtaatcccaggactttgggaggctgaggtgggcagatcaggaggtcaggtgtttgagaccagtctggccaatatggtgaaaccttgtctctagtaaaaatataaaaattaaccgggcgtggtggcgtgcaactgtagtcccagctacttgggaggctgaggcagaagaatcacttgaacccaggaggcagaggttgcagtgagcccagatagcaccactgcactccagcctgggcagtggagcaagactctgtctccaaaaacaaacaaataaacaaacactaaaaaagctcagaattgtaaaatttagaatcctattgtcaagttttgttcagtttgtttttgtttttgaaacagggtctcaccctgttgcacaggctgggatgcagtggcacgatcatggctcactgcagcctcgacctcccaggctcaagtgatcctcccaccacagcctcccaagtagctggaaccacaggtgcatgctaccatgcccagctaatttgtaaaggtttttggtagagaaaaggtctcataatgttgcccaggctggtcttgaactcctaggcacaagtgatcctcccacctcagcctcccaaagtgctgagattacagtcatgagccaccatgcctggcagttttcttcttttgttttaaagtgagacagaaatcaaactgatataccaaaggagttcatcacactgaaatttaaataactgtgaggctcctgcacagtcaacagcaatcctatttactgtctgtattattacatgtcagaggtatgaatcagattaacaaattaaattgcctcaaatgtgagtttttgtattaatgccatcggtgaaggcatttgtcattttttgctcctattagccaggaaaggggatgtcatgcatcttgtggcttggaaaatgttcataatttgtctgtgcttagacacagttatggagtagtcttgtttttgtcctgatccaccatgatcagagtggccttgtctgctgttgatgttctaggagattgtttatgtccaacaggggacaccaaggcctggttgatttcaccaggccagctcttggatgtcaggtgctgcttttcttctttctcaagtaaagctcactcaagttggagtaggaggtttaagtgtccagcacaccctctccattctcctccccttttctggctaacagaacctctctttcctgcaggtaacacattgaaggtggtttgtgtggactactgaacctcaacaatactcacttagccaatgaaaaatcatttattattatgctaatttatgaattcaccagtggaattgtaaactcttgtctaagatcacccaaaagtgaaccatccctgaagcatgggttctgattagggccttcaaatgctacctaaccatccctatggtatagattgaaattaatttacatttgcacacatcacattgttcacacagagaataaaacaccatcaaacattaattgtatgaaaaaataaatctgacatattatctagaaaattttcatgcattctgaatctttgaacataccacaaaaatgggatcattggcggctgaatgtggcaaagcgtttgtcccgttcaggaaggaatgaaccaaattatgaaggctcatcacttgagaatccagagtcccatctgctttatcaaacccttccaaagcattcctaggagaaacaagtatatcagtgacaacagacaaagactgataaaggtctcttttttgttgttttcagcctagataatagttgtctaatttgagattgggtagggatatgggaagctctgtcatagcaaattgaccaagaatttgccccaaactttaatgataatcctctgtaaggggagagaactcctaagcaacgctatttctgaattatatctcttttgtgtactgtatgacaactttcatatctgtctctcattcccttggagagcaggctctatgttttcttcagatatttattgccagggttcagtaccatgcccagcagattgtctgtgatcagtaaattcttttatttaacatataatctgatatttatatttctcaaccaaatagaccttcagcttgactgaaggtccagctactcaggaggctgaggtaggaggatcacttgagcccaggagtttgaggttacaattagccatgattgtgccactgcactctaccctaggtgacacagtgagatcctggctctaaaaaaaagaaaaaagaaaaaaattttctaccaccatagaaagactttaagaattatgagaaatatgtttataaataagactttaaacaaagatgggtccaaaaaggggatggtagatagattaaagatcttctccaaaactggattctctctctctcttaactgtgtttaaagtagacaatttgtatgggcccagggcagggcaggctggactcaaatgtagaggttgtgctaagtgtagcatggctcagtctgctgaggttggacacagccttcagagtagtgtcaaaggtgggggaagggtaacatttaaggttgttttgaaaaggaggatgaattagtttttcattgtgacaaaagtgctattaaaacagattgcattttctatatgtttgagttaggggagttgttctcaaaatgcagtgctcagaccaccttaactggcatcatttgggatttggttagaaatgcaagttgttaagacacagcctacacctactgaaccagaaactctgggagcagggcatgaaacatgtgtttttctttggtgattttgagatgtgcttaaattctaggcctacctctacaggtacataccaccacacctggctacttttttatatttttttgtagagacagggtcttgctctgttgcccaggtggtctcaaactcctggactcaagcagtcctcccgcactggcctcccaaagcactaggattacaggcatgaacaccatgcccaacctgtggtggaagattaatagttggtctttaaatgttaagtattgtaatgtcattgctgtgctatgatttgagttgaatttagtctgcaatactcctctgagatctcagacctcactattaagttctatggctgataaatttctaatatcgacattttaaaaaataagaaaggaaagagaaagagcatggacattgaaaaaacactatatttaatgaagtaccctgtttccaaagactggacctattaatgtactgcaattagaaatacaaaagttggttttgaacagctaagttagaaggtattaaaaccacattgttagtcatagtagatgggtaaagactttcctcacaccaatcccttgctaacttctctcgttaggcctctctccatcacttagcttcgtagacaacccccaaaacctgggtttccttccagttctttacaatcacaggcatgaaaacctgtactgtacaggcaggtccagcagagctcagagcacccacctgaaactgaaggtagagttctggaagaagggaggattgtcaaacttctggagagacaggcaatctcgtatgtcttttaaggttggcaatttcatgctgtttcttcccatttgatttcttctcagcaaaccttcataggttccattgcacaaggtgaccaggtggttgtagtcatccaagctaagatttgtaataagatttaaaataatatatgttggctgggcacagtggctcacgtctgtaatcccagcactttgggaggttgaggcaggtggatcccttgaggccaggagtttgagaccagctatggcaaagccccggctctactaaaaatacaaaaattagctaggcttggtggtgtgtgcctgttgtcccagctactcaggaggctaaggcaggagaatcgcttgaacccaggagacagaggctgcagtgagcagagatcatgccactgccctccagccttagtgacagagtgagaccctgtctcaagaaaaaaaaaaaatcccccaaaacaaaaaatgatatgtcttaacttatgtacagtattataaatttgggccaagcaaatcaatcagggtcacaatcatggtaaaattgtattacaattactttaccagagttaacaatatgtggtaaaaagtactatacctgaaagtcattatgggtcgagaagtttcaaaaatgtagatgcacaaaatacggacatgggcataaatatgaataatcattaccattctgttggaaagacagtgagagggtttacaaggcaagatgactcctattgtgtgcatttgaatcttgagtaactgaagggagaatagggtggttcgtattatgctgagctaagccagttttggcagaagtgacatgtaaagttacgaaaaccttttaggcaaactgaaggcaaacggggaggtcagagtaaaagcagatgaaagtacacaaaggggagatattagaagaaacactgtgttggaaaatgttccaaggtagtagagtatcaatagttaagtgctcagcatgggctgagaaggtcccatgtccgtaagacattatatcctacacgcctgctatggcctggattccaacatcagaatagtatttctttctttctttttatttagtttttcttttttaatttagagatagggtctcactctgttgtacaggctagagtgcagtggcatgatcacagctgactgcagccttgaactcctgggctcaagcaatcctcctgcctcagtctccccagtagctgggactactggctaactttttttttttttttttttgagacagagtctcactctgtagcccaggctggagtacaatggcacactgcaacctccacctcctgagttcaagcaattctcctacctcagcctcctgagtagctgggactacaggcacatgccaccaagcccagctaacttttgtatttttagtagagacagagctgtcaggctggttggtcaccatgttggtcaggctggtctcgaactcctgacctcaggtgatccacctgtctcggcctcccaaagtgctgagattacaggcgtgagccaccgtgcccagctaggctaacttttcaaactttttgtagagacagggtttcactatgttactcaggctggtctcgaagtcctggcctcaagtgatccccctgccttggtctcccaaagtgcagaccattatttcactggcagagataaaaatttaaagatgttattgtgagggttttcatgaattagggataggacccagtatgtgagaatataatcagcacatccacagggatgaaagaggccaggacctaaacactaagctgaaaaaggtctccaaggcctcccaggcagcgtttcccaaagtggattccaatgggatgtccggtgaagtaagagttccagggttaggctcctcttgaaaaagaataccacatttatctatggaaagcttgacgacattctaaaaatttaaaaaccttttaaactcagccttctctaaatttacttgatgacggaaatctcttttcacataccatccactactattccaaggtatggtgggaaatggcgcttgatggaattaagctcagtcacagaaaaagcactgatgatgtccctgctcgtggagcactgttctgagcactgtaggaaatgtacaggatgtggaagacgaagtccctgctagctgggcatgggcccctcaaaacgcacacctatgcaggctcagggtgttggcagtgaagcctgggggccgggggagccacagctctgtgccctggagcagtctaaggacctgggacgaaagacagagcagtggggttaaaaacatggggattttgaggccgggtgaggtggcttacacttgtaatctcagcactttgggaggccaaggcaggcagattacgtgaggtcaggagatcgagaccatcctggcaaacatggtgaaaccctgtctctactaaaaatacaaaaattagctgggcgtggttgcgcatgcctgtaatcccggctactcaggaggctgaggcaggagaattgcttgaaccagggagtcggaggttgcagtgagccgagatcacgtcactgcactccagcctggtgacagagtgagactccatctcaaaaaaacaaaaaaacaaaaaacaaaaaacaaaacaaattttggaggaaaaaaatgaataaaggaaggtgaggtgaggagcctcttgggaaatttttggctgaaatgtgttccaggtgttccaggacagagaaacaaattcaaggagcctttgaggacagaactcttcatgggctgcaggccaggccactgacctgtgtatggtctttagtatgtcacagatcatccttccccggctggccccaagcccctgtcctcctcaactcaccagcatcctgtgactcagccataccaggctgtttccagagaattatctagcttcacacatgatgttcctccatcaaggacccacccactgccctcccacactcccctcaccctcctctacacctcaggtctgtgcccctccccttctcagagccatcatctctgcctcttggggacttgcccagactctcttcttgtctttgtgtatacatctattacagtacttcccacactcaactgtaatttacttacaagaaatctatctcgttaatacaagacaatattcaaaagggaggttttatttcattcatctttgtattcccggcagtaccacatcacatgggatatgattggtgcttagcaaatgttgattgaatgcaagaactactcttaatttgattaggttgatgcaaaagaaattgtggtttttgctattacttttaaaggcaaaaaccgcaattacatttgcactaatctgataaaactaacctgatctcaaaatgatggccaagcataaccaattcacaaatgtgattttgatattttttttttaattaaagagctttgaatttttgaaatcccacctcccagaggaaaactgtttttagaaacatgtaaataggacaccacatgcataagaaacagcactataaagtgacttctcctccatgtctcagacatcagaaaagacaatctctggatgccattgcaggtacaggagccattacctatcacagacagtttcccagctggagaatcttgagttccgactaatcagagtcggatcgtctggtctcgctgccccaaacagctggtctgtacacacatcacactcgttcctcccagtggcaaagttccagtagggcaaagcaaaagactcattgccaatgagtcgctaaaagcaaagggcaggcctagtcatttaatccatgccatcagatacaacaagaaagcatacaaggcaaaggctgatatgtatctgaaccaaatatctaccaagacaaagactactggatggataaatgaatgaagaaactgtgacataaatcagtgtgtgtatattttatatatatatatatatatatatatatatatatatatatatatatatatatatatactgtgtacaatggagtattattcagcctttaaaaaggagaccctgccatttgcaaaatgtgaatgaatctagaagacattgtgccaactgaaataagacagatacagaaagaaaaacactgcactatctcacttatatgtggaatctaaagaaaagaagaaaaaagaaaaagagtgaatacatagagagttacatagtagttacaagggactgggagaaatgggaagatgtaggctgaaaggtgcaaagttgcagttatgtaggataaataactcgaggtctgagactatagttaacgttgtattgtgtactggtgatttgccaagagagtagaccttaggtactcttaccacacacacacaaaaagagatatctctatgtgatgctgagtatgttaatttactttagtgcactaatcacttatcttgtatgagtatcaagataagtatatcaaaattcacactgtatgccttaaatatatacaataaattttttaaaaaattaaaagaactaaatgcatagttttgacctacctggagatctctttccagacacaacaaatggtaccggtgccaggtaacaaatgcaggtccttgatgtgagaaatctatggccctgtaggggcgtcctggtcctgaaacaattgggaaacatattagagatgacagaatagaattttttaaaatgttaaatcttacctgggctgtatctatagagccaataagtccatgatgttttatagtagtaagaaaaaaaagttttgttgttatttatatctccaaaagcaatagtaatgacatgaatttcagaagtaactagtacttttaggataaaccctcctttatctcttaaaaggttgatttctagcagagatccaggaaattcaggtgactttcaggattgggagcccctgatacatatttaatttgtaagcaacaatccattcaggtgaaatagactatccaaaagaatagatcattaagacctaaangaaatatattttttaaaggcatttgctaacctatgcttcacaaagatataaatttaaaagggagggattaattaataatattgtaacttcaactgcacttagtcctaatgcagtatttatgtaaccaaaaagaactttcgcgtattttgcctcacccatcaatctgttataactactagctgacaagcatgttcgctgagaccagaagagagaaaaatacattcaagccatttaggctggacactggaactgccaattttagtgaaaagctctggacgatttaatgacctccttactgcctggtccatccttcttccctttttcataacagctttgatggttatgtggaaactttagctaactttagttcttgtccaaaatacctataacaacttcagagagctgaacagacgtgaatataaatttaattcgtagctatgaccagaaactaggactttcttttcctcttgagagagtactctctcataaagcaataattcctcagagtgataacaggaaaactataaaggtttatagccaaaagagcctccttatctatcgataaagacagacagatgcttacctgtaaggcaagttttaaaagactcacactgagaaaagcactgctgtccctgatgttggctacacggccctttttcatgttcaattcagagcaaggtttcaaattctcagaacccaacaacgagagggtatcaattgaaggggaacaagtgatgagcagaaggatgaacctgtccaaatcagaatcttgctcttcaaagtgagcttgatgtcttcattcatcctgaccccaatgaaggaccccaaaaatggggagaggtgcacgtgcagccatgcattcaagaactgctatgggaagaatctaggatggagtcaagccctcctggaatacattggtgtctatggctttcctttgactgaaaaataaggacaaagctgaacctacttgatacatgaagtttgtaacagacaaccccctcattccaagtcctacccagcccccaatttttaagacttggaagggcaggtcaccaatttctcaagcatccaacatgactgtgttgcaaagagctaagcagcagaaactctacattgctgtggctaagcttgtacttttccttgacaataaagctccaagaaacctggggattccggaccatgcaggagtaccataaatgattatctgaaagtctatcatgtgatagactgtctaaaatccatccaaagttgatctatcctgtgagtttaacaagatgcccactcccaacatgagcactctaattccgcacaaagaagcttcatgtgccttagcacatgttcagttaattcctctaatttggagaaaaggtcagagagggcttccatggccagattcgcaaatattttcttctgaaatcaaaaggaattcgcctccacctcaccaactcacatctttgatgattaacangcttcacagaagaaaagtttacactttgaaccaagaacatacggtagaggagagaacatttaaagtgtctgcatccaatgcacaggaagaaactgcttccttctaactccaggcggtatttgataattctacgactttcataaacctaaggctgccttgtggttgctctcttaattaacttgcatgaaattacttcccactgccataccctcaacccaatcncaaacctgtaataatataccttcagccaaggaaaaaacccacctaataatgtatctctaacagaataataatggagccacacaaaaaaatcataaacactgcagttggcaaactgcggctgggttccattgggcccaagcaggcccagccagtgttgtgtggtgatcacgtagtcggggtgtactctcttcttcgcgagatctaaggcgcccaagaactgctctctttcctgaggactcaaggaatggatgttctgccgaatcactggtggtttcttccgctcgcagttgggaccggtccagccaaacttgcagtctccacaattatagccggcaaagtttcctagttcacaaaacagaaagatggaaaggaagggggtttatgtcgtttggaagaaaattctgattctatcatatttgtactctgaaatttgaatggaagagaagatgaaggtgcttacacaaaggcaaagaaagtcaattttcctcccatggtctcctcttaaatgtttatatctccaagtggactaagcactagagggtttcctagacacattcccagcaaagaaacaggacatgaaatacactgtatactgcaatgagctaaaccgtgtccccgaagtcctagccccagtatacctcgtatgtgactatatttggagatagtgtctttaaagaggtaattaagggtaaatgaggtaattagagtaggccctaatccaatatgactggtgtcctcaaaagaagaggaaatttggacacagttttggaaggaagaccacatgaagacacagggagaagacagccatctgcaagccaaggagacagccctcagaggaaaccaactccctgatctcagccatccatcctccagaactgtgggagggtgaatttcagtgtttaagctgcctagtctgtgggatgttgttacggcagcagtagcagactcatgcacacactccttcctcccaggatcgcaggcgtgtctcctcctgcgtccactccacgcccacaaaaagggatgacacagaacagttcattgatttagagaaggaagaaaatacacagcaagctaaagatgaaaccaaaataaatacatggcttggcccggtggctcacgcctgtaatcccagcactttgggaggccgaggcgggcagatcacttgaggtctggagttcgagaccagactggccaacatggtgaaacctcgtctctactaaaaatacaaaaattagcggggcgtggtggtacatgcctgtagtcccagctactgcagaggctgaggcaggagaatggcttgaacccgggaagtagaggttgcaatgagccgagatcatgccattgtactccagcctgggtgacagagcaagactctgtctcaaaaagaaagaaaagaaagaaagaaaggaagagaaagaaagagagagagaaagaaagaaaataaatacataaattaactgatttctaggaatttagaagaaatctcacatttaaaaagctgacttatttcacgaagttgacagcattaagacaaaatcaacggaagctgtcaagtcctcagggtgaatcagtagccatgatgtcaggaagtacaaaccaccacaggatttctgtcagctgcacaaagctccctgctttctcaaagcccagggaaggaggacaggactaataagatcaagctctgggcatctctctgatcagcatctaaagtttacatccttgtagcttgccccagacttttcccttcttagccttccaacttattgcctttgggtatgaccaacatttcattccttaggttagagggtaaaatttaaatatcattagagcacaagattgaaacgaaaggggatgataatgcttatctcccagaagattaaagggattacgtaaagcatttaaagagggtgaccagctcacttactcctcctcctctacctcatgccctaggcctatttgcttgcttttccttcttcctgaaacacttttccctcactgtctccctaaattcctctttacctgcgtgatccatttctcctttaagcttcacgtttgtgctctctaaggtcattcttgattccaaaggtcggggttcgggtcagttacttccttgcacctcatacatcccctttcttcacatttatttacactgattgtaaacattactacacttgtttcagctccaggcagctgtaaggctgtgaactcactgcctaggcctgtgcttagccttgttcaaaacaaatgtgtgttgagtgaataacagaagtatcgagcatgtagcagatgatgccacatacattttctctccctgttctgtgggtttgcagaaaaagcagcccctataaataattttggtaaactacaagtagcaaaatagaggtaagtaaaaagtactatgaccataggggagggggagttatttggatctctcaaggaaaggaaaattttccaacagcatgaaaacaaaatgattaacagcattctgtaaagaaaatgcacaggcttccttttctacagtggattttctgatagttaaagaaaatttccttaaaatgtaagtagggagaattttttctaattgtaatcggttgagtttttttgttttttataatatatcatatatcccaccttttacgtagctcaattatctgtatttttcttttacagcactctatgagaacataagttaaaatattgaaaaaaggaaaaattctactcttcccaagactaacaatgtttttgaatagtttaagttaaacattaaaatgtacattgattcctggagataattaaatacaaactatttatttaacaaatatttatgaagcggctactatctcatcagatgctatgcaagatgcttcgttttatggaccttgaagtctattttccctggggcaaccttactaaaactgtatgtattaaaaacagatttgattaaaacatatcacctactatgacagtanaggaatggaacactgttttgagaactgagtgaacaaaatgctgtgtctaaagaagagtagctacccagattaaaattcagtcaaatttccagctgcctatctatagctgattggaggtaaatgtctagtcacttctctgcagtagaagagtaattccttgcttcataatgctgagaaatttggatgataataatgtcggtagaggttcattgattgtaaccctggtttgcggatgttgctagtggaagattgcagagtgtgggggagaaggtagatgggaattttttgtactttctccccaatttcaatgtgaatccaaaactgatctaaaataataaagtctcaatatttaaaaatattaataaataacacacctaaaatttataataataatttaatacctttttacatttaaaggcataacacttgtttttgaattgggggcctgactgttgaaactgagtcattcataacttatgccatgaatttgaagactactcttattttctttgccatgattctttgtagttggcagaaacaaaataattggctctctcatgtatttatttaacaaacaatttattgaacagctactatctaaaaggtagccaacactaaacatgcactgacagtgagggagatgtgagtgtgtgagggcagggggttggcaactctctgtacttttgactcagttttgctgtgaacctaaaactgctctaaagtctattaaaaaatacaacaatcaacacatcttcctttatgctaccatagcttttatgttataaaaaacaagcacattaatgtggagcacatagaactacatctggtatacagtgagttaaatatatacatacatacatatatatatatatatatatatatatatatatatatatatatatatattttttttttttttttttttttttttttttgtcaagacagtctcactctgtcacccaggctggagtgcagtgacgtgatctcagctccctgcaacaaccacctccccggttcaagcgattctcctgcctcagcctccctagtagctgggattacaggtgcacaccaccacacctggccaatttttgtatttttagtagagatggggtttcaccatgttgggcaggctgatcttgaactcctgaactcgggtgatccacctgccttggcctcccaaagtgttgggattacaggcatgagccaccgcaccctgccgtgagttctatattgtgttattattactagtattattagagaccacttatcaaatagtatagcaattgtttgtcttcatatctgtcttacatatgactatactgtgcacatcttaagaatcacgtcagtttttccccctctctgtatctgaagggcctagttgatgctaaataaatgttgcttggatgggtggtgaaagaatcaatgaataattgaataaaagggatcagacactagtgaatacaaatacagatggcctctgacttatgatggttcaacttaaaatttttcaactttaggatggtgcaaaatcaatatgcattcagtagaaactctacttcgaatatccatatgactattttggttttcaccttcagtacagtatttagtaaattacatgagatattcaataccttattataaaataggccttgtgtgagatgctttgtcccaactgtaggctaatgttagtgttctgagtgcatttaaggtaggttatgctaagctgtgatgttcatagattaggtgtattaaatgcatttttgacttaacagtattttcaacttatgatggattattgggatgtaaccccatcataagtcagggagcatctgtataaatgaggcaataataccttagtctagtggaaatgaaggacaagtacacaatgacatttcaacacaagtcaaactgtgggaaaagtgaaaacagaggaataagtcaagctccactggatgacaaatgacgaaatgattaatcctgattcagaaaatcagagatgcttcacaactacagtgaacaagaaactttaatgtaaccagagttgcctccaaaaggcaatgtataagttctaataagaaagctttcaacatctgtgaaaagaatgggaagtgggggggtaaagaaagcttgtgtctgttttggagcccatttatgacccagaaatttattcaattaaaaaattccttttccaagatgtctcagagaaattattccaaagctctgcagtcaggtccctttcatttctaagtttatagacctgacctgaagaatttgttgaaatgctggagatgactgaaaagtgtaacaacatgaaagcctagcagacaaaatgtttatttctttaatttagttttcctaatagcatcttccatcaatttaacatgatttagttttttcttcttaatctaccaatgcaaaaaatataagaagagaagtgttttagaaagaaccgtgttatcttactgggaaatggagagaggaaaaaaaatgattcctagataatatcaatctatcgaccattgagtatgtccttcagtgaaaattaaatttaaagagtcaaagtctcatgtttacaaaggactatgataaaaatggaaaaaagagtgagatcatctaaacaccacacattcctacatgaactgcatcagctcaacctcagaaagccattagactaaataagcttaaagaccaccgattagtgaatttacaaggaactctaaatagcctattccttttaattagagattctattattttaataacaatactttatacttacataggtcctttcatctacagaaatcaaaaggattttacaagtgtggtttcatcattatccccatttcagagattggaaaatggaggcaattagtcacttgtacaaacaagaagttcaccgtcaactgttcaaaaactatttggtgcgcaagtttttcagaagccaaaagacatagctgcaaatggcatattctcataaagccaactggcaggtaagccttataaggtgaatagcaaattcaaagtctcctgcaattcagctcttcctgacaattaagctcagtggcttttttgtttcaatttatccctacagagactatagagaagctctctacagagaatttcaccatagaatttagagttttaaaaaacaaatcccagaatttctatgtgtttctacttattaggctgaaattactttaccagcttcatgattatggaaactatgaggtgtttattttccaaagaattaacaacatttggggtcatcaatagtctgttacaagacactaatctacatctcttccttgagaaattttggatcatcccaggagtgccccagtgactccattcgcaaaagagtcatcaggctactgtagaggatgttctctgggaggctcaggatcaggtttcaattccaaagattgccccacaaaccataaaaaagctaccctaggaaggctagcaacttactctttggggaataattaattgaaggacatgtgtcctgctttgggacacacggctcatcacagaatggtaattatgacatacacaaaataacttcccagctcagtcactaaggacttagtctcgtgccctgagattcaaagaaaaagaccatctagcaagataagtagagccatccaaagttggtatgacaatacaatggaatattattcagcctttaaaaagaaaaaaattctaccatttgcgacagcatggatggacctggaagacatttgtgctaagtgaaataagtcagtctcagaaggacaaactctgcatgattattcttatatgaggcatctaaagtagctgaacatagagaagtacacgacggaattgtggttaccaggggatgggggaggggcgatagggagttgtaaagttataatgatacaagatgagcaagttccagagattttctgtacaatatagtgcctatagttaacaataaggcattcggcacttaaaaatgtgttaagagggcagatctcatgttaactgttcttaccacaaaagcaaaaaataaacaaaaacaaagaaccacgaggaacctttggagatgatgaatatgttcattatcttgattgtggaaatggcaacacaactgtataggtatgtccaaacaccatattgtgcacgttaattatgtgcagtgttctgtgtaacaattatgcctcaataaaactgggaaacattaaaagtctagtaaattgaacttatagatacagtaaatcttaagttacctttaaaaaaatgtaggtgtggaaagagttctgttcctgatgagtttggactgagcagatcacggggggaggtgagccacagcctggagatggggcctcagggccaggccgggccttgacaatggctggagaggcagaccatctccctggaggaagccctgcttctttggactggcttatgtacatgggacttccttacagcctggacttaaagaacaggccctatttatttctggcccaagggctttttagagcagggggagcctctttttttttttttttttttttttttttgaaggtaggtctccatgatcctaagttcctattacttctagagcaatatttataaacatttccttaccaaagggaaatagcaatgatcccttctattctttctatccctacctaaaacaaaacaaaacttgctagccatggcaaaaatatgaagaagctggtaacaaaaagagtttatggttatatgtgacttcctaaagtcctctgcctcaggattctatgcaatgcagatttacaactttttgaaagtgttggcactttcttttttttttttttttttttctgagacacagtctcactctattgttgcccaggctgcgtgcagtggcgcgatttcagctcactgcaacctccacctcctgggttcaagtgattctcctgtctcagcctcccaagtagctgggattacaggtgcccatcaccacacctcgctaatttttgtatttttagtagagacagggtttcaccatgttggctaggctggtgttgaactcctgacccgtcttggcctcccaaagtgcttggctcccaaaggcgtgagccactgcgcttggccagcactttttcattgattgacatagaaataattgttctagaagtattttggggttttgaacaaagaagttactgtgttagtgtggttttcaatcacgctaaccacaccagcaacctgctcctcattcgtctaaaacaccatgataattttgagagaaggtctatagaagcaaatgcttaaaaaacttagaaaagctggataatatatatccaatatgttattgaaatttttgtcatgattaatacccagggcaaaaccaggacctagatattcttctgaatgacagaattaaaaatattactacaaaatgattataaagccagaactatttatttatttatttatttttttgagacagatctcactctgtcacccaggctggagtgcagtggtgtgatttctgctcactgcaacctctgcctcctgggttcaagagattctcctgtctcagcccccagagtagctgggattacaggtgcctgccaccacacccagataatttttgtatttttagtagagacaaggtttcaccatgttggccaggctggtctcaaactcctgacctcaaagtgacccacccacttcagccttccaaagtgctgggattacaggcgtgagccactgcaccaggcctaaagccagaactcttaatgtgaaaaaagaaatctaatgtctgggcactcatggacataaagatggcaacaataggcactggggactgctagagaggggagggagggaggggtcaaaggttgaaaaactacccactgggtgcttcgcacactacctgggtgacaggatcaatcatatctcaaaccctagcactgtgcaatatatctatgtcacaaacctgcacttgtatccccaggatctaaaataaagttgaaagttaaaattaaaaaaaaaaatcgaatgtcattcctacaccaacatcacaggcctttgtatgttcccttagtaatacctattcaaccccttatgaagctcaatgacctatatcctcctatgttccagcatcctatgagaagagaagtaaaaagtatttttaaaaggaaaaagtcttctgcaaccacccagcctacaacagtgtccaagggctttcctgaggttgccacttgtgttttttgtatttcagtggccccctgccaggctttgagtgtttattcccgaagggcatatggctgctggaaactggaggtgggaaagattgaagaggatttgaaaaagccccaaagagctagaggaatgagaaatgcacagagatgtcaaagcaacaggtaatgagagagaccagagtctaaaggaaggacactgagcaaattttgtgatgtccggttcaagtccagagaagagtgacaaaaagccattgttatctaataacaaccccccgcccgccccccccacccccagctcctcgagaaagctctgtcttgccacgtctcgacaattttgtcaaagttacaacctggtcataagctttaatgagaaacatgcaccctgctgaggtcaggagttcgggaccagcttggccaacatggtgaaaccccgtctcgaaatacaaaaattagccaggcatgatggcgggtgcctgtaatcccagctacttgggaggctgaggcaggagaatcacttgaacccgggagatggaggttgcagtgagctgagatagcaccattgcactccagccacggtgacaaagcgagactccatctccaaaaaaaagagagagagagagatctgttcaaatcatgagaaatgctgagaccagaacacctgcctttgactcctgtcttccgaatgccaagcttcacccatcccttttcaacaagtgcaaacccatttcaggagagggcaccgaatccatcttgaaaggacttgctccgagtttcaaagctgacgcttttaagctcttaaattccccttccaacaaacaagccaatagtatgttggcatgcattcatataagcaggcttggcccacgccatatttatttagtcttcataactagatgtactagagggtgtgaagaataaaccagcacatcagccttattgaatatgcttccgaccaaaaccatcattggtttgcctttcaaagcctaatctaagagtctctgtcaagagtctcatctcttccttagaaggagctctttccccagctctggccctccccaccaagcttggagcatgggcctcacctgtgcacttgcaggtccggtggaagaattttcttggccacagctcacggtcatcctggtttcgtaggatgtagggaccactccagggccttgtgtcggctcgcacctctgtgcactgcccccggccttgctgagagccacagacattggccgactctgcacccaggcgtgggcagcactccttgttcactaggctgtccaccgtcatgcagactcgggggaactgaccctgggctcctggcaggattttgcagcccaagcaactgagcagaaacccccaccaaagggggctcatggctttataattgggagagctctctctctctcttactttccttgtctctgtcgtacttttctccttatcttctactctttcagtcttttcttttcagtattttttatttttctttgctttctattcctttcttcttaaaaaaatacccacaagaatcacagaggttacatgtgtgcacatgtgtacatgaacgtgcacacacaattttatgtgattcaaacaactaacagacttaatttccttagaagcgcctctaacaaccaaatttaatgagggtagcgcttctcaccatcttcccccgttaagtcaggctttgtctaattgagttaatttacagagcacccagtcatactacttattatgctggtatttctaaaccctctccctccctccttagctcttgactttaattgc

SEQ ID NO: 227 - DNA, 16896 bp, Homo sapiens
  misc_feature (224)..(224): Marker 869745  n = t or c
  misc_feature (1084)..(1084): Marker  869787  n = g or t
  misc_feature (4998)..(4998): Marker 886933  n = t or c
  misc_feature (5463)..(5463): Marker  886937  n = g or t
  misc_feature (11359)..(11359): Marker 886938  n = t or c
  misc_feature (14820)..(14820): Marker  886942  n = a or g
  misc_feature (14903)..(14903): Marker 886943  n = t or c
  misc_feature (15593)..(15593): n = a or aa
  misc_feature (15773)..(15776): nnnn represents aaga insertion variant
  misc_feature (15939)..(15939): Marker 217485  n = a or c
  misc_feature (16220)..(16220): Marker 217486  n =a or t
  misc_feature (16283)..(16286): nnnn represents aatt insertion variant
attaattatcaggcagcaatccacatgcacttaacagttctgacgtgagaggacaagaaacacaagcaaatataaaacattcaattctaagagaagttcatcagagacatccttcaggattgtgaggtactggaaagaagtcctatggggagtgggtggacacgtgccaaaactccattagtgtaagggactttaaatcacagaaattaacttgctggaaatcngttcccaattcttccttcagctccaaggttaaattaaatgtaattaatgatggtgacctgctaattcatgcttttgataactgatatctagtatgtatatatatataaacaaaatgacgaggacagggaatttaattatttgggtatcacacatgyaggtgttatatatgccaaattttaaaggtaaawtactacttttattatttgtgtgaaatgtcattttacatatgggttccattttgaaagtggtttgggaagggggcataccattttaagtaccaagaaaaacttgcataatctcattttactttctctttttcagctggattttcctctacgtgcttcagtcttctctacacaaagagctgcaaaccaggtctttgttttgcactcttatttcaagcagaatgagtgctcctaaactcctctctctgggctgtatcttcttccccttgctactttttcagcaggcccgggctcaattcccaagacagtgtgccactgttgaggctttgagaagtggtatgtgttgcccagacctgtcccctgtgtctgggcctgggacagaccgctgtggctcatcatcagggaggggcagatgtgaggcagtgactgcagactccyggccccacagccctcagtatccccatgatggcagagatgatcgggaggtctggcccttgcgcttcttcaataggacatgtcactgcaacggcaatttctcaggacacaactgtgggacgtgccgtcctggctggagaggagctgcctgtgaccagagggttctcataggtaagtggagatatgaatgagttcataagtcctgcatgagactcaaggctcttaataaaatcttaaancatttgagctggaggaatacctggaaatcatatagctcaaccctctcttttcatagttgaggaaactgaggcttagaaaggttaagaaacttgtttaatgtaaagggttggagttgaagctcagaacttctgatcaatattttattctgaaacatttattgagcaaccactatatcctaggaactgtgttaggtattatgactagtcaattcagtaactccttcaggtaaacatgttaattgtcatagatgaggttcagaaagttcaaatccacacaggtgatatttagtaaacctggaattcatgctgagatctacctagcccttatattttagttctgcaactacccctgctgacccttaaagaagtttcccaccatgatgatcaaattcagcatttgagatgaagagtttggcctgcagactaaatagcattaaataacaaagcactaaacagtaacagccaacaatatttgattgtgttctatgtgcgagatagtagactaagggtttaaatgaacatgtattgagtccttactatgagttaggccttgggctaattgctttttatgtgtgtggtctttgaactttcaattctgtaaagcaagtattatttttatccacattttaatgattaaaaaaaaactaagacttggaaaaatgtgcccaaagtcatagaataattctctggtcttaactactatgttatatcacctaattttcaaagatttataatgttaaaaagacagaaaattccaacaaaaatgccaacagtgggcagaaatcaacatgacaaggtcacagaaacataaaatccataggtaagattaaagaaaggtaatataaatcatgcagtaaattggagagagaaaagggaagaaagagagagaaagcaggcttgaagaaagggttttagttaaggatatttttaaaagtgtaaaataatttaaaacacatttgaacagatggataaatgggtcgtggtgtgttacaagatgattatgctctttctctacccatccccgcaaggcagatgttttcatgcttgaattttgtatccctaaagtcaggagaaatcttctggacttaagtaaagaagaaaagaaccactttgtccgggccctggatatggcaaagcgcacaactcaccctttatttgtcattgccaccaggagatcagaagaaatactggggccagatggcaacacgccacaatttgagaacatttccatttataactactttgtttggacacactattactcagtcaaaaagactttccttggggtaggacaggaaagctttggtgaagtggatttctctcatgagggaccagcttttctcacatggcacaggtaccacctcctgcgtctggagaaagacatgcaggtatgtaagaagcatttcagtttgcagactctttacagacaagatgccttgtttgtaagtgattttaattcactagttttcagaatcatcagaacatttgatgaaaaagcaattttatgttactaacctgtctttggcatttcgttttctccttattttggttacttgttaattaatctttatcttggtgaagtgaaaataaagcaaaatcaataatgagcaaaatgagacatttgcaggaatgaattaaaagtttaaaaatattttgcagtttcattgaaaacatgactttcataaagcttgaaacagaagaatctcatttgcatgtcttccttctctactaaatataagcagattcctcctcctggtcaagtgatgtgggttagagacttctcaatctttccagtcctaaatgtatatctcatcattccagcgatgattccctccaacatggtatagggtttaaatcatgaaaaataattcctttcaatttagactctcatattttcattgaactatatttttccacgttccctaccctttgagtcttacagaagaaacctattaaaatatcacatcactatataagaggacagatattttaatttgcttggctatagtaatcactttactatgtatatttatatcaaagcaccatgttgtacacctaaaatatgtaaaatttgaaaaaaagttgaaaaatatcaaaataattatatcagtcaggcaatatttttagtgaaaagacattggctttttatttggcacaaagtgaacctcaactcaagcagttatttcatgcttattttctaagcagataagcttcaaacatattaaagtatctagttacgtagattctttactcttatttcttttaccaactgctctgttccttgagaaaaatatggaaattttaaaataaaagtttaagttgttagatctcaactaggaaatccacaaagtaaacctgttttctatgtgaaataacagcaatgaatctcccccttcaagttaagatataaaaattaagctaaaaatatctgaagaagggaaaggcgtttagattcatttattaatttgcagaatgctgtgccagcattattccgagaaaaaataaatggttagaagagagagaattaatgcactaacatacaggataaaatattcttttgaaagtacactatccatttgcagtttgagagtgattaaatgaattcatctgatactctgaacgtcatattttatagctctgattgcaagtaagacatttagtagattatagataaatctgtcatttgtaattgactgcagatcttcatgccttcaagtcattttctcatgggcacaccaaaatgaaagggcaggtggaaagtatctaaaagcttcaattttgcctgtgtaaacttcaacctctatgacttacattttaaagacccaacagcacaagggatgcaacaaattagaatttaaatgtaattcgtggttgaaatgccacatgaatatgctctggctcccaaatgtcagttgctgaaccacaaaccgattcttaatgatcccttggaagctgtcactaatttttgtgaaccacaatgatggcttctaaaggaggactacaaacccctggagaccaataactggggataacttggaaagcttttggctctctaaaacacccaaggataagaaaatgcttcctaggaagggatttaaagtgaaaaagtagaaatatactgagtgcttgagagataagataaaacaattgcaatccctacatttaaatcccataccataaatagaacttctcaaggcaccaaagaaatgagaaataacaaggaaatgtatgttttaaagaaccgaatgaaataagcatgtgatcttgaggccagcatttttaaaaatgtgagatcagctttgaatggaaactaggtctctgatctaaaaaacaatgggcagaaagatttactctgcttctgtttagcatttttatcagtataaatttaggcagaagcctgagtcttaaaagtttagattctaaggcagggttccctaaataaaacaccttccgtgctcagtgtgaaagagtccattggcctgttgccaaaccagaatctaaatgcctagtcattcaaattaaatttaaaaacagaagcaaaacaaaaattagcactccacaaaacatattttaaggctggatctggctccagactaagagttaatgatgcttgaattaaagataggaaaatggaagaaggtggaaatgccaagaagtggatgttgttattgataacttttttgtataaccaatataaatgtaattatctgcctaaaaaagaaaaagaagaccctttatccctttaaatcattttcagaaatgtctgcataatgagttgagtttcattccctctaatgcctaaatgacaccttgtaataaattaccagctttgttaaataaggttttaactcctctgggcccctcagacaccgttgatatactaaccagtaccttattgtctgaagagagctaanagaaatagactgtcagagagtagaccaaacagaaatgaataattgtaaacagaagcagagagtattaatgtggtttctgtgatctaggaaatgttgcaagagccttcyttctcccttccttactggaattttgcaacggggaaaaatgtctgtgatatctgcayggatgacttgatgggatccagaagcaactttgattccactctaataagcccaaactctgtcttttctcaatggcgagtggtctgtgactccttggaagattatgataccctgggaacactttgtaacagtaagttccaaatgatagcttggagtcagaatttctttttagataawgagattaaatatgttgcctgaaaggccttcattctactagagaattcagactaaaatctacttttattatagagtaacagtgtaccaggcattcattaaacacctagaatgttcaaggtactctanaagttgctccaggggaaacagaaagtgcctacacatttttacactgcctttcttgagtagtttggtcaatatcttgctaactttcttattttggaaatgtctagttgtataaactaatcctcttagttttcttagcactacttagaagtcatgtgtcttgtgttggaatttcacagaaaatgtttcctaagaaaatgtgaaaaataggcaaaaagttggaaatgccctgggaagaaaaaaaagaaaagaagcaaaccaaatgtatgcttgcagttataaagttagaaaacaaaagctgatatgggggatagttttcagaaaaggagtatattgtactgatgtctgccccctagctgctttccagctcttccaaagtgaacacagtaagagtacgcctaatcagttgtcccagcatcctttctccagtgatctgaatgccaccactgtcacaggtcaagtttctgccacatgtagatctcttcctgagctttctgttctcctccttggatcatattattatttgtgcctgtggtagtaacacaaggtttaattattagacaccccctacctcatcttatttttcttcttcaggcatgtatggctcttttgattgttcttccatataaaaataagagttatgtgaatttgttttcttattataatcaccacatacttattctacatgtattattttatgcatcaagtattattttatgaacttaaataagaaatactctaaataaatcagcaggaattagatacatattttcaccattagattatttagcaatgtataggaataagagaagtgataatatatgaaaatttcctctgtagaagtttaaaacttagaataaatttgtatttgtttggtatgctgaatgcatgatcccaccttgtggcagagaactgaaattgaggatcaggatgtctgcagatgccaaaatgtttatactctttgtgaccaggccattgtattttggcctgagagttttctagacatttcccaatcaccctgatgattggataccaaaataaaacacagtttaaatgagtgaatgcaatcatagcacaggagggggaagaaagaggaagagattttcttttcatcataatttttcttgtcaattaatataacaagtctcctaactcagacacatagtctcatgacaaattgaagaatatttattttaggttaaaatatttttaagattatcccttgtctcactgcaagagataaatggcagacattttatttataaggcaaaggaaagggaaaaactatcattttattgaacatatattatgtatctgatatagtatgaaatgcattgatatagtatcctatttagtcttcataacaattctctcttctattactgttcttctttaatgatcttgtccatttctgtagttccattcgtcatcttttactggagacccacacgtttccacctttagataaaaccttctttctttaaatattccatacccatgtcttcacatgcttgttgcatagtatttctccaatattcaaaattaatgcgccaaacttggtggattgaaaatagttaatattttattgcagctaacgttcttccagccaccaaaataccatctttgaatcaacatagaaaaacactgttctttattcacagtacttctcaaatatattttcttcttcagacatgggcaactttccatttatttttatgtggaaattccacaggactttggtccataggatgttaggtgcaatggcagagtttgtccatatgcaaacaaatttaagaatcactggaataaaaaacaaactggtttattttttatataaactagtttctttactgtcagcattttctacaatggaactctgtgagggcaaattagaatgtaatgttttgaaactcaagtaattaatatttgtttcttgggatttattgatagcttcctgagcagtaatccccaaaacatcagcttgaattgatagtctagctagtgatggtgaaagttttgggtgataatgtacactcaataaatagtttccaatcccacctgaggcatatgttttagttacatattatttaaatttcattatgctaacttaacaggttctgattattacgttaattataaagcatagaacatgggaggctttctgaatgaaggaaaaggaatatgagttgaagttgtaaaattatctctcaccagcttagtggattgttttgcttgtccctttacggtacatatattcctttctggagaccactgggacagaatgatgcaaaattttcctaaccaatcacctctcctcccacccatctaaggttttgacttctctccacttcctaataaatcacacataactttcttatcttgatacttgatttttttttcacaatatagctctggtctagcttcttttctttcctacagtccactactatcctggcacatactccaggcaaactatttcccaaacaggccctccccctttttttgtttattttacagctaacatgatcttttccatataatgacaggcaccaaacaactcttcagcacctattcaatgccaggtactgtgccaagtctgtgggatacaaagtttttttttgttacagatagggggtgttatagacagaagaaagtgtatcatctcttgccatttcctctgcctaaaatgtttgtcttgtaaaatttatttcacctaagaaaatttttcttaatcctatggggctttgtgtaaatctctcttctttataaagcctttctggagatctgactgggcaggatctctctctctctttccctgctccctcccaccatctctcttctttaaggctcctatcatattatctatccctagtatcacagttctttgtttgttactgcccttcacaaagtttcattatttctcacattaattgctgaaaaagttgaaaaatgtgtgttggttgacatatgtatcactttccaaagaaatgtaagggtttttttttccttatttctctgaaggtttaaatagacagcatttgcatacaaaatatcacatatatgtgacataaagattttagtgtagaactagatttatgagattattttggcaaaattcaattttccatggaattttcattttaatacattcttgtggaagaagcatatattgatttaacaaatatcaacacctgtatctgttagtgtgattcttttttttccttcagatacttttatgtatctcatatctacttgattcaaagaaatgggacatggtaacttagattttctcattttaatgctaccaagtatgcatttttaaattttcttttctaccaaggaaaacctatatttcatattcatgctatgtataaagttttaaagagcgacaataagaactccaaacattgtgtaaatgtttccacatcccatttttttctgcaggcaccgaggatgggccaattaggagaaatccagctggaaatgtggccagaccaatggtgcaacgtcttcctgaaccacaggatgtcgctcagtgcttggaagttggtttatttgacacgcctcctttttattccaactctacaaacagtttccgaaacacagtggaaggcaagtaaatgaaatcagtatttttaaaagatctagttatcagagaaaactgaattattcaaaagcaagtttctttgagaaggctttgaatagtatattaatcctgtgtgtttatgtgaatgagattttctattatgatacacctgcttgaaaaaggaactttcttaaaaagaagagtcaaccatgaagctcttttcattataggtgaagcccttggaaatcatgctctaatttcttaaacacccaaaaactttttaaattcaaatttctggtagctagctggccaatatgtaactatatcaaggtctctagcattggcaaacaatattcaagactttgacagtgtattaaattagtttagttttttttttaaatagagtaataaaaaaaattccaaacaattagttgacactgagtaaagccttgcttgcgcatatgttttatttaggtccgtattaacctgtaacttttttcaaaggtctgtacaaattcaaattagcatctactgatgcttaacttggttttccttatttcacacaaagtattttaaagctgaggaaagtgaggtataaacaggtaaaattactatcacaagatattcagctagttactaacagagcgtaggttcaaattcaagttttcaaaatccagtgtctttgtataataaattttgatacctccaaatgatgcttgatatatatatatatttaaagtcttcaaaagaatataattacttttatcttataaacttgttattgttaaatttttaccttcaatatagcattgtccatgtctaatgcatcccatctccccaaaaaatgcaaatacatttctctgccctatgatcagagatacttggtatacaaatctaataattatttttaattctctcaccttttagtctcaaaattatatgccatattaacctatttttgatcattttaataactacctgaatgcactgatttgaatatgattcaataaaaaaaatcactatattttggctaatctgtaaactaaggccatcagcactgatgttttaaaaaatgtacagattgtgtcttcttaatgcccaatcagaagacaattatacttatttcctgacaaaatgtataaaaagacgagtgtcaagccacgttccatatatatcacagacaatctttaaatgtttttgagtcaaataacaatggaatagatgcttgaaaaaatgcataggtggctaaataagtggctacaactatacaattcatcttagatgaagagagaactggttaacatattttaaattctgatttcattttataatgcacaacaattccctgatctcaaccctctggtccttcaacccaattagacagcctacattatagaccctccatttttatttatgacctgtcttataccaatccttgttttctcccttatatatggaatatatatatatatgtgtgtgtgtgtgtgtgtgtgtgtgtatatatgtgtgtgtatatgtatatatggaattgagatatttatcaaaagctgtataaatgttttgacagtaggttttcccgatgtttaaaactagcacaaagatggaaagaaagccctgaggaattgtagcttccccacaaaaaatagttttccaaaaataaacgtgctaacagtcattcaaaaataaggtaggaggctgaagtaacatctggcaacttaagttccaagacaaccagagcattcttctcccaattgtgtcagcagtttttagcagaaactggagattttcactatctttattcccatgtagaacaatgtctgccttgtcaaatagagtgtctatatattttgactggtatcctttgcaggtcattatttttaacctggaggctacatttagaatgtcatgccactagcataaaaccagcctagctctgggtatagcaaacaaatgtcatcaaccataggtacagagaagcagtgctgttatattaaggcaaaaattggcctgacgagccttgaaaaaattgtttcccaatataatcattgctattacctggaaaagtgaaatatttgcaatagttttactattctcctccttaccatgtgtctaggttacagtgaccccacgggaaagtatgaccctgctgttcgaagtcttcacaatttggctcatctattcctgaatggaacagggggacaaacccatttgtctccaaatgatcctatttttgtcctcctgcacaccttcacagatgcagtctttgatgaatggctgaggagatacaatgctggtaagacattttcatatgcnttttgcatgctcagctgggcrgattgtttagatggcatagttatcagttcaagctgagcactcagcgcataaaaacactttcaaaataaggatagcatagctgtaatatcaagtcacttccagacattcaattctactttgaaaatgcaggcaagaagtctctccaaatagttattataggatgatatttttaaccatttgctgggactaaccaaatcatctctcctaatttttgctacgaaaaaatggctactatgtttcacaaattgttcttaccctcatcttccaacataaattctcattacttttaaatataaatgaggaaaaccttatagagctcttctttgatatcccaaaagactaaaaattttatacccataatccacagttcttatttttattacttaatggcccctcacaaatagaaattgtgttccacttgaaaagttaatgttggcttttatatcacactataggaaatctcttttaagttcatttcaatgcattctttaaaatactatttaaaaggcctctttctctgccttcctatgcagctgagaggctagcattatttttcaaacaataaaagtgcttccactggttaaaacatcgcaaattttcataggttgaaagcattctaaattttggcttttgtgcctttagctcataacgcacataaacctgatattgtagcttaactacctattgatttatgtatccattaggcatgctttcatttctatgtgtgtatgtgtgcaataacgtcctctaatccaacctaattaggaccattaattgatgaaattgatgaaaatagtttgttccatcaaaaattatttaagaaacaacttacacataagcctgtaatcgcagcactttgggaagccgagatgtggggatcacttgagcccaagagtttgagaccagcctggtcaacatggtgaaaccccgtctctactaaaaatacaaaaattagccaggcatggtcatgggcacctgtaatcccacctactggggaggctgaggcaggagaatcacttgaccctaggaggtagaggttgcagttagccaagatcacaccactgcactctagcctggctgacagagacagagttagttttcaatcagttatgaattcagttattgcagtttcatctcattttcatgtgtatttatatacataatgacaaccataaatctataatttacactgtcagcttttttaaaagtgaaacaataaatgagtgacttttgaaatacaatatgagggcaaatattttagccatacacctttaacaaatctttccaaaatgttcaatttacatactataaaaacaacatccttctctttgttttacagtcatgatgaccactttatgtttgtttaactagattacttttattacagtaatgagtaaactcaaattaataggtttaggaattaacaaaaccagcttttgttaaacatgcacttctgggaactacatggcaatgttcaagttgtatttattcagttattcacaatgccgtgggtgttagtaaactttttagaggaaatggagactattcagtaacctggcaagtctcttaagtggagttttctttcacctatgaaagaaaggaaagatattccttcaccttgtgtatcttggctgaaaatataattatttcacattgatagcaagttgttaaaggttctccagattttaacttaaaggtcattgatgaaccagaaaaataccttttgaacatttttttctgacattttctttgtttgcaatatgtgtagcataaggtttctcagtaacttgaattgtagtgggaagagaaataccgtaaataaaaaataggaaactaccctgcagcacatttctgataaaatgtggccataaaattataggataggtcaatgtaaacacttgcaaactgcatgaaagctaagctgaaacaattagcctccttcttaaatattccttgtacctgcaaatacgttttagaaatcagtgtcataaaacaactgtgaagaagagaaagaaaaattagaaagattaaaaaaatttataaaactgtctgtaaagcaagagtcttgtttaaaataagtctaggagtggagggatggaattctttttcaaaatgattgaaaggtttttacaaatatagaaagctctttacaaattgcagaataatagaattattaggcttggaaaggaacaaaaattacactttacagataaagaaaagtggagtcattcaaatattaatgtccattacaggttcctttcattagacatgaaatagtacaattgagagcatccaaactctagttactaccatgttaatttctatttactaacatttctgatctatatacacattcaattcaattccttctcttttatttcaactgagaattatatgaattaagttttaaatatagcagcccagaagttcagtgtattttcagaagaagcagtttatacgtttccaagagtgatcactactttactttttgagctgtgagagaaatgaagtaatcacacgtacacttaagtcttttcatatatattattttcaaatctactatttcctggtcagtattcaaggtaccagaaatacgatgctatacaaaattcaccaacaaattttcttcctgaaacttttcttcctgttgataaaattgacaataaccatatgtaaatacatatacagcatgttagatggtggaagtctctatagacaaataaaatcaggaaataggataggcagtactgtgtagatatatggaagaagaatgtcctaagacaaaggaacagggagccaactgtggctggagtagagtggggtctggggagagagtggtgagagatagtaaggtcaaagggataacaggaggcagagctgtatgccacagcaaattacaggtttatgttttctttggctttgaaaaatacatttaatgaattttattcaaattgctttatgtaatttttaaaaattattcaagatcaccataggtgatgaaatactaaaactcccctgcttttaaactctcttttttattaagtggtatattggtactgtattcaaagcattttctgttttatgtaatttctcatcctgctgtagtgaaacttcatatctttattcagtgtaaaataagaataaaattttttcaggttctccttgaatattggatgcctttagaactcaataatgataggaatattaattwtattatgtttattaatacgttgtctttggaataatttagatatatccacatttccattggaaaatgcccctattggacataatagacaatacaacatggtgccattctggcccccagtcaccaacacagaaatgtttgttaytgctccagacaacctgggatacacttatgaaattcaatggccaagtgagtgttgaaagtgtatttttactgtgataatttccaaaancaaatgtgttatctttcaagtagagtaatcacggtattctgaagctatgttttccatttggacttggaaactttcatttgtanttttatttgaggataagggaaggaatttgatatttgttgagagtccacactaagctgatattgatcttattgtacagcaccctatctcatttaatcctcacaatgctttggggtgagtatgaaaatcttcatttcacaaataaggaagctgaggcttaaataggttaactgttacagattcacatttctaatgagggaagagaatgagtttgagcttaggcccatggaatatgccccaatttttctactataccatattgcctgcatttatctatcttaaaggaaaagggagtgagatactcttaggtatttttctgagattttgaagttcaaaagttttttgtttaaatcttttccccaacaaaggcagtagggcatagtggaaaagtacaagacttatattctaaaatatccgggctccaaagccaactttattgcttaccaaccaagtgacctgggtaagtgactcagactcattgagtcatcattctctcactttcacaaaatgaaatggaaataacaatgactatcccaatagggtccactcattaaaagaaatcaggaagtggcttcaaggccatgtggccaatgtaaattaaatatgaggatttctgttaaaatagacatttctaaatttcatgtgtccactttttggtgataactattttaatatttgtctttttatttttntcttcctttccaaataggtcgggagtttagtgtacctgagataattgccatagcagtagttggcgctttgttactggttgcactcatttttgggactgcttcttatctgattcgtgccagacgcagtatggatgaagctaaccagcctctcctcactgatcagtatcaatgctatgctgnnnnatatgaaaaactccagaatcctaatcagtctgtggtctaacaaatgccctactctcttatgcattagtatcacaaaaccacctggttgaatataatagattgagttattaactgtattttctttcactttattaccttctttctaatacaagcatatgttagnattaaagttctaggcatacttttcaaagctgggaagaccctttcagaatcttttcaatgggttttaattttcagttctatttaaaatggtgaatgacactaaactccatgatatttaaggatagtgtgaagatctttggcatgatttaaaggttgagtatgtgaagatataagtaagtgaactaccatgctttgtttacgtgtaaaggaaaataatgtttgatagtaaatgtccacttaaaatacatgaatgggcatttctaaaatgttaaaacataaacncatttccattcatggatatttgtcaacagatttaaagaaaaccacagttattaattaaagaannnnaattaattatgtgtagttataaaccaatgaaattttgattaaccttttcaaattaatgttccagtttgaagaccaatcaaatatattatttagtcaacatatactatttagtctcaggttcaaggctacaacaaaaatcaccatctttgtcaaactttggagagggaaaatcttcactttcttaagcaacaatggatattgcctgtgtttgccactgtgtttccctgcctctcaattcgctgaaaaaggaactacctatccttacatttcacctactaatgtctcttctaacatcttagaggtccatggagaaggcatatggagaacatgttttatactgctctataaatagtattccaatcactgtgcttaatttaaatagcattmtcttatcatttatcagccttttatgtattttccaagtaaaatattaacatattayttcattggtcttcttttttatctggttctatatgaatgctattttttcccttctcttctaacatgaaatatattttctctttttgatcttgtgctatgaaacaatcttccaaagaactgtataaggtggtcataagtgaatattttaattaaaattggtaaaaataaa

SEQ ID NO: 228 - DNA, 2359 bp, Homo sapiens
  misc_feature (915)..(915): marker 217438  n = g or a
  misc_feature (1092)..(1092): marker 217439 n = t or c
  misc_feature (1119)..(1119): marker 217441 n = t or c
gagagggcaggtcccggggaagctccggactcctagaggggcggccaggtgggggccctggtgaccaggacagactgtggtgttttttaacgtaaaggagatccgcggtgtgagggaccccctgggtcctgcacgccgcctggtggcaggccgggccatggtgggtgctcacgcccccggcatgtggccgccctcagtgggaggggctctgagaacgactttttaaaacgcagagaaaagctccattcttcccaggacctcagcgcagccctggcccaggaaggcaggagacagaggccaggacggtccagaggtgtcgaaatgtcctggggacctgagcagcagccaccagggaagaggcagggagggagctgaggaccaggcttggttgtgagaatccctgagcccaggcggtagatgccaggaggtgtctggactggctgggccatgcctgggctgacctgtccagccagggagagggtgtgagggcagatctgggggtgcccagatggaaggaggcaggcatgggggacacccaaggccccctggcagcaccatgaactaagcaggacacctggaggggaagaactgtggggacctggaggcctccaacgactccttcctgcttcctggacaggactatggctgtgcagggatcccagagaagacttctgggctccctcaactccacccccacagccatcccccagctggggctggctgccaaccagacaggagcccggtgcctggaggtgtccatctctgacgggctcttcctcagcctggggctggtgagcttggtggagaacgcgctgktggtggccaccatcgccaagaaccrgaacctgcactcacccatgtactgcttcatctgctgcctggccttgtcggasctgctggtgagcgggassaacntgctggagacggccgtcatcctcctgctggaggccggtgcactggtggcccgggctgcggtgctgcagcagctggacaatgtcattgacgtgatcacctgcagctccatgctgtccagcctctgcttcctgggcgccatcgccgtggaccgctacatctccatcttctacgcactgngctaccacagcaycgtgaccctgccgngggcgcsgcrasscgttgcggccatctgggtggccagtgtcgtcttcagcacgctcttcatcgsctactacgaccacgtggccgtcctgctgtgcstcgtggtcttcttcctggctatgctggtgctcatggccgtgctgkacgtccacatgctggcccgggcctgccagcacgcccagggcatcgcccggctccacaagaggcagcgcccggtccaccagggctttggccttaaaggcgctgtcaccctcaccatcctgctgggcattttcttcctctgctggggccccttcttcctgcatctcacactcatcgtcctctgccccgagcaccccacgtgcggctgcatcttcaagaacttcaacctctttctcgccctcatcatctgcaatgccatcatcsaccccctcatctacgccttccacagccaggagctccgcaggacgctcaaggaggtgctgacatgctcctggtgagcgcggtgcacgcgctttaagtgtgctgggcagagggaggtggtgatattgtgtggtctggttcctgtgtgaccctgggcagttccttacctccctggtccccgtttgtcaaagaggatggactaaatgatctctgaaagtgttgaagcgcggacccttctgggtccagggaggggtccctgcaaaactccaggcaggacttctcaccagcagtcgtggggaacggaggaggacatggggaggttgtggggcctcaggctccgggcaccaggggccaacctcaggctcctaaagagacattttccgcccactcctgggacactccgtctgctccaatgactgagcagcatccaccccaccccatctttgctgccagctctcaggaccgtgccctcgtcagctgggatgtgaagtctctgggtggaagtgtgtgccaagagctactcccacagcagccccaggagaaggggctttgtgaccagaaagcttcatccacagccttgcagcggctcctgcaaaaggaggtgaaatccctgcctcaggccaagggaccaggtttgcaggagcccccctagtggtatggggctgagccctcctgagggccggttctaaggctcagactgggcactggggcctcagcctgctttcctgcagcagtcgcccaagcagacagccctggcaaatgcctgactcagtgaccagtgcctgtgagcatggggccaggaaagtctggtaataaatgtgactcagcatcacccacctta

SEQ ID NO: 229 - DNA, 9840 bp, Homo sapiens
  misc_feature (429)..(429): Marker  552  n = a or g
  misc_feature (880)..(880): Marker  560  n = t or c
  misc_feature (1381)..(1381): Marker  559  n = g or a
  misc_feature (3037)..(3037): Marker  468  n = t or c
gaaaatataaaatgcttagtctggccaatgtggtaaaatcctgtctctacaaaaaatacaaaaattagcctggcatagtgatgggcacctgtagccctagctactggggcaggagactgaggcaggagaatcacttgtacctgggaggtggaggttgcagtgagccgagattatgccactgcactctagcctgggcaacaagagagagactccatctaaaaaaaaaaaaatccagctagcaaataaataaatacataaatccagggggcctatgtcaacagctccatcctcctgacacaaactatacctgcattcgttctctctgggtttgggaatctaggatatgagccaacatatatgcttgtctgaaggggccacttacctcttcatctttctcactgagacttaatttattagccttattctgtncatcttaataaaatctctgctactgtgaggccctactgggggcctttcaacaactctgcccaggcctggggtctcctggggccacagacattaaaaaaacacacagaagcagccaacacaccaccctctggacagcagagaccagtgcaatgcattgctttttctctttgctccaatctccttctgttccttgtctttctctcttcctcttcccatctctcttctctcttcttccctcatcaattccccttccccatcctaagccttgctaatcctccagctccaccaggacacttgcctaacagggtcacaacaccagcccaaagaagcacaaagaaagcaggaaggcctcttaccattacccctgacccacccacctgaccaccttctctgtcccactcaggcctcctgggatggatgtcacccgcttactcctggccaccctgctggncttcctctgcttcttcactgccaacagccacctgccacctgaggagaagctccgagatgacaggagcctgagaagcaactcctctgtgaacctactggatgtcccttctgtctctattgtgggtaagtcacctagcctctgggctctggcccaggagaggggctgcaggagatcaagcatgcttcccagggtgctaccaggatccaccgccatggtcacggctccttcttgctcgttccaggaaataatcctgggagaataaggtggcccttgactcatttggtttgggaaagctctgcatgccaccagtctaataagcagcttagcatatggtagaggctctgaaaggcctgaagttaagacacttggtgaactttgtttaatttagcatttctgaaacttaatgaatcacagaactcctgtcaacagtaacaaacttcaggaaatgctccagaacatatgcaagtctgggatggaccagtcctgtcatgtcagggttgngaatgaaggctcaggggaaaatatgaggggcactggagcctggcattggagatctggtttgacttcacctgataataatcatagacatactgtgtggtaggcactgtgaggtgagtatggtctttattcatatttcacagttgaggaacttgaggcttaggagaattaagtaactagcacggatcacacagtttttaactggcaaagccagaattcaaaatcaggtacttaactccagaacctaagctcaaaactaatatctcttactacctcggcttttgctaggaaacgaggatatttgaggctgggtgaggtggctcacacctgtaatcccagcactttgggaagctggaggcatgaggattgtttgagcctaggagttcaagaccagactgagcgacatagggagaccccgtctctacagaaaaatttaaaaactagcaaggcacgtggcatgcacctgtaatcccagcactttcgtaggctgaggcgggcagatctcttgagctcaggtgttcaagaccagcctggtcaacagggtgaaaccccgtccctattaaaaatacaaaaattaaccaggcatggtagcatgcgcctgtagtcctagctacttgggaggctgaggcaggaggatcacttgagcccaggagtttgagcctacaatgagccatgattgtgccactgcactccagcctgagtgacagagtgagatcctgtctcaaaaacaaacaaacaaaaactagccgggaatggtggtgcatgcctatggttccagctatttgggaggctgaggcaggaggattgcttgagcccaggaggtcgacgctgcagtgagctatgatcacaccattgcactccagcctgggtgacagacagaccctgactcaaaaaagaaattttttaataaataaataatcggccaggcgcggtggctcacacctctaatcccagcgctttgggaggccaaggtgggcagatcacctgaggtcaagagtttgagaccagcctggccaacatggcaaaaccccatctctactaaaaatacaaaaattagccaggtgtggtggtacatgcctgtaatcccagctacttgggaggctgagacaggaaaatcacttgaacccaggaggcagaagtcacagtgagccgagatcgcaccactgtactccagcctgggcaacagagtgagactctgtctcaaaagaaaaaaaaaagaagaagaagaaagaaagaggatattctacacatatcagacagggaagggaggaacatcaacatttattgatcttcagtgtaacagacttttcactttataaacagacttcatttatcctcaagacaatactgcaaggcagatattatggaaccttttttgcagatgaaaaaactgagtctcatggaggataagtaagttacccacagccacatagtcattatattggcagagtcaggattcaaatcaggtcctcctggctccagagctctcaggaatggaaaataggaaacacaggtgcatctgtgtacaagacaggagtccattttctgggtatcacaatgttcctgtgcctgccacaatggagatgaaggaaggggcacctggggtggctctgagtggcccaagctcacttaggtcgagggaccaggccccacaagagngtcacaggcagatcccagtgcctgcttggatttcccatttgccttccctcagaggacacgttgctatcagtgcctggctccaggtcagtagccgggctaacaagaacctactggcttgagtcctacagtgtgactcatccagcacgcttcttctcctctccctgaccttgtgacttcccaagccccctctgcccctctcacttcactgcagctcaacgtccccagaaacatctgactttgctccttttgtctctctttgaagcgctgaacaagaaatccaaacagatcggcagaaaagcagcagaaaagaaaagatcttctaaggtaagggcagggaagttctgggagttctcattgttggggtgagactggacttaaagaaggaggacccccaacctctggctaggaactaaatgaaagatttttcaggcctatattaacaaaagaaactgaaagctactaaagacttcctggcttgagctctgagccagacacccacagaagcccagggagctgaagtccactgagcaaaataggttacgaaaagcagcttcctctactagttagcccctgcctgaaatttcaccatcactcatacttttggatgaatgtggtgtttcccaaacctcagtcatttcagaaccacatttataactttgccatatctgagttccacctatttatttaacatatttgtttaaaattaaatcttaggccggatgcggtggctcacgcctataatcccagcactttgggaggccaaggtgggtgaatcacctgaggtcaggagttcgagactagcctggccaacatggtgaaaccccgtctctactaaaaatacaaaaattagccaggcgtggtggtgggcgcctgtaatcccagctacttgggaggctgaggcaggagaattgcttgtacccgggaggtggaggttgcagtgagcttgagccattgcactccagcctggtgacaagagtgaaactctgtctcaaaacaacaacaacaaaaaattaaaacttaaaaaatgcagttgactcttgaacacatgtgtttgaactcatgggtccacttatacattggttattttatgtctttttttttttttctttttttttgagatggagttttcgctctcgttgcccaggccagagttcggtggcgtgatcttggctcactgcaaccttcacctggcgagttcaagcgattctcatgcctcagcctcccgagtagctggaattacaggcacatgccaccatgcccagctaatgtttttgtatttttagtagagatggggtttcgccaagtttgtcaggctggtctcgaactcctgacctcaggtgatccacctgcctcagcctaccaaagtgctgggattacaggggtgagccaccttgcccagctgactttttaaattggaaaatatttttgaagattgacaattagaaaaaacaggtgaatcttgttacctagaaatatttaaaaaatgaaaaaaaagtatgtcattaatgcataaaatatatgtagatactagtctattttatcacttgctatcatacaatatacataaatctattataaaaaattaaaatttcccaaaacatatgtacacacagacagtacataccattcaaaatagaaagaaaataaccaaatgtaaagatgtagtactaaatcataactgtgtaaacaactgcagtacatactgtactaccatcataattgtgaagatacctcctgttgccattgcggcatgctcaggtgttgcgagtacgtgcttacaacgctctgtgagctaatcatctctgcacaaggagtctcaccaggaaatcacatattgcagtaaaatgtgatccctcaaggttctcgtgtatttttcaatgtgtttaatgcaatattgtaaaccttgagtagtaccaagggacccatactaggtgctactagtgattctggaagtgttcccaagaagcaaagaagagtcatgacattacaagaaaaagttgcttgaattacttgattgatactataggttgaggtctgaagctttggttgcttactatttcagacagacaatacatcttgtaaacagatgaagtaaacttacggtatcaataaatacagtacagtactgtaaatgtattttcacttccttatattttcttataatcgatctctacttatccaataattttcttaatattttattttccctagtttacttcatttttttttttttttttttttttagaaatggggtgtcactctgtcactcaggctggagtgcagtggcaccatctcggctcattgcagcctcaacctcccaggctcaagtgatcctcctgcctcagccccacaagcagctaggactacgggtgtgcaccaccatgcctggcagatttttgtattttcagtagagatgaggttttgcggtgttgcccgggctggtctcaaactcctgagttcaggcaatccgctgcttctgtctcctaaactgctgggattacctgcattagccaccatgcccagccagtttacttgattataagagtacagtatataatacatataacataaaaagatgttaatccacagtttatgttatcagtaaggcttccttctggccaacagtaggctattagtagttaagtttttgaggagtcaaaaataatatgagggccaggcacggtggctcacacctataatcccagcactttgggaggttgaggttggcagatcacttgagtccaggaattcaagaccagcctgagcaacatgatgaaacctcatctctacaaaaaatttaaaaaattaactgggtgtggtggtgtgctcctgtagtcccagatactcaggaggctgaagtaggagaatcgcttgagcctgggatatcgaggctacagtgacttgtgatcataccactgcactccagcctgggcaacagaataagaccctgtctcaaagaaaaaaaggatttttgactgtgtgtaaagagtttgtgcccctaacccctgcattgttcaagggtcaactgtatataattatgatagaaaactagtatcacttaccataaatagaaggtaactataaaaataagtaaagttggccgggcacagtggctcacacctgtaatcccagcactttgggaggccaaggagggtggatcaccttaggtcaggaatttaagaccagtctgaccaacatggtgaaaccccatctctactaaaaatacaaaaattagctgggtatggtgctgcacgcctgtaatcccagctactcaggagactgaggcaggagaatcacttgaacctggaaggcagaggttgcagtgagccaagatcacaccactgcaccctagcctgggcgacagagcaagactgtctcaaaaaaaaacaaaagcggagggggggaagttaaaacattgttagtaaattctgggtgaatggatggtattgcctaccaaaggctctaaatttgaggcctaaatctctgtgttaaaaggcataatggccaggcacggtggctcacgcctataatcccagcactttgggaggctgaggtgggtggaccacaaggtcaggagatcaagaccatcctggctaacacggagaaaccccgtctctactaaaaatacaaaaattagccggaggtggtggcgggcgcctgtagtcccagctacttgggaggctgaggcaggagaatggcgtgaacccgggaggcagagtacagtgagccgagaccgtgccactacactccagcctgggtgacagagcgagactccgtctcaaaaataatataaaataaaacaaaaaataaaaggcagattaggccaggcacggtggctcataactgtaatcccagcacttcaggaggctgaggcaggcagatcacctgaggttaagagttagagaccagcctagccaacatggtgaaaccccgtctctactaaaaatacaaaaattagctgggcgtggtggtgcacgcctgtaatcccagctacctgggagactgaggcaggagaatcactggaacccgggagatgaaggttgcagtgagccgagatggcaccactacactccagcctgggtgacacagcaagactccatctcaaaaacaaacaaacaaacaaacaaaaaaggcagattataaagtgttagaaaggcactaaggacacgttagcaccaaactgaccctttcaagttgaaaaagattgaaaaaagaatccttttttattgtataattcaggatcatttaacattcacgtaccacctaaaatcataccaccattaacacaggttcccactttgggaaatactggactgaggcattgctgaaatgcacaccttattcctgtcttagtgtgcctcagtttatcatatcaactgtaaccaaagcaaggagcactggattaggtattaggaggtaggatctggcactgtgtgatcttgaaagtccctgctcttttctaggcctattttgttggctgtaaagtgaacaagcaagatgagattattgacagataaaaatatataactgacaaatatatttatatgctaagcactgggaacatagcagtgaataagaaagatatatcttatccttggtctcatggagtttacattcttgtggagaaaacaggtgaacagcaagtaaatcaataaataggtaaataaattcagatgttaaagagtgcaaagaaattacagcacggtaatgagactgaagggaagagtggtctgggaaggcctctgtaaggaagtagcatttaaatagagtgaaaaactcagtaacctagagcagcagcgtccaatagaaatacaatgtgaggccaggcgcggtggctcacatctgtaatctcagcactttgggagggcgacaagagtgaaactggctctcaaaaaaaaaaaaaaaaaaaaaaaagaactgtgatgtgagctacataattttaaatttgcttatggccactttatttatttattttttttgagacagagttttgctcttgttgcccaggctggagtgcaatggcgcaatctccactcacagcaacctccacctccccggttcaaacaattctcctgcctcagcctcccgggagtagctgggattacagatgtgccaccatgctgggctaatttttgtatttttagtagagacgggtttctccatgtcggtcgggctggtcccaaactcccgacctcaggtgatccgcctgcctaggcctcccaaagtgctgggattacaggcatgagccaccacacccagttgataaccatatttaaaaaaaaaaaaggtgcaattaattgtaatattttatttaacctagtgtattcaaaatgttaacatttcaatatgtgattaatttaaaaagttattgaaataatttatttttgttgtgctaaatctttgaaatctggtgcatagtttacagcacatctcattccaatgctcagttttgacaagcataaaatgtagttctaactaaaaagttgtgtttaagaggaagaatatttttatattgcttcagttttacattttaaatttaaattaattaaaattaaatttgaaaattcagtttctaggttgcactagacacatttcacgtactcagtagccacagatgaccagtggctacctgtatcgaaggtacaaaaaccagtggctatttccttcccaggaaaagaagcagcaagctgtggcagcagtgtccaagacagctcctgctgggttcctgcagcaggaactcacctgctgcgttcggtgcacagcggggcagcgaagttaacaggggtcggagaggcaagcaagggccaaatctcaaaggccaaaagaaagttcatgtttcattttaagttcaaagagaaaccacttaggccgggcgcggtggctcacgcctgtaatgtaaacccagcactttgggaggccgaggcaggcagatcactttagctcaagagtttgagaccaacctggacaataagtgagaccccgtctataaaaacatagaaaataaaataaaaataaatttagccaagcgtggtggtgcgcacatgtggtcccagctacttgggaggttgaagtggcagaatcgcctgagcccgagatcgagattgcagtgagccgagatcgcgccactgcagtccagcctggctgacagagtgaaaccctgtctaaaaaaaaaacaaaaaacaaacaaacaaaaaaaacacaaactagggagaagacgaccagggccaggcaagagccaggtaagtctggatggggatggaggtgagggaatctgactgggggagcgggcggtgggcggtgggcaagccagcggggaaacctctggtccgggatctccctagcccgaggagctcccaggcagaggtgaggaccggaggggtgggcgtggccggctcataaagccccggcgtttcccacgcagaaggaggcttcgatgaagaaagtggtgcggccccggacccccctatctgcgccctgcgtggccacccgcaacagctgcaagccgccggcacccgcctgctgcgacccgtgcgcctcctgccagtgccgcttcttccgcagcgcctgctcctgccgcgtgctcagcctcaactgctgagcgcccccactcccggccgcgagcaggcagggcttcggggacgcggggcgcttctcgggcgggtgatccctaacagggcggcttcccagggctgcaggcgggcggaggttccaggagatgggacttcagggagacctggcttgggctaaaatcgaaatacaatatatataggctgctcgaaggtgtgcggctgtttctgtaaagg

SEQ ID NO: 230 - DNA, 11937 bp, Homo sapiens
  misc_feature (8481)..(8481): Marker 662  n = c or t
  misc_feature (8699)..(8699): Marker 637  n = c or a
  misc_feature (11799)..(11799): Marker 656  n = t or c
agtgcctttggttgctggagggaagaacacaatggatctggtgctaaaaagatgccttcttcatttggctgtgataggtgctttgctggctgtgggggctacaaaaggtatgtgtggatatgtggacatgagcaggtgtgaacttggggatgaattccccctgctctggtttctgtcctcctaatgggagatagcggcaatatttcaggcgtctcccactcatttgatttagtgaggatgtgggcacctgggctccctccctacatggagatttgggattttgcctgaaaataatctcatatgcttggaggggcagaaggatagaaggtctctgtggcactgattctgaggcttccttggcagtgagctggagcacgggctccaaaggggtgaaatgtgcaggagactcttttaggaaacgtctcttggggtaggagatttaaagtggggagtcagagaatgtggtattgggtaagaacactaaggagatacaatcctctcctcttgggatgggtacgggtgaacacagcccagaccttttgttctggggctggagagataggcagaggggtctcagctgagcatcacatgaaagggctctgggggattgggcctcgtgacaggagcaaggggcgggggtggggtggtgagagggtctggaatgtcccgtgctgctctgaggagagttggaagtggagaaagaatggggtatcttatgacttctcttgttctagtggtgggatgctcaatagatgattccagatcctcccccagcagaatcaactagggttacagcacacattagaaagggaatgaggccgggcgccgtggctcacgcctgtaatcccagcactttgggaggctgaagcaggtggatcacgaggtcaggagttcgagaccagcctggccaatatggtgaaacccccgtctctactaaaagtacaaaaattagctgggcatggtggcacatgcctgtagtcccagctactcagaaggctgaggctggagaatcacttgaacccagaaggcagaggttgcagtgagccaagatcacaccaatgcactccagcctgggtgacagagcgagtctccgtctcaaaaaaaaaaaaaaaaagaaaggggatgaggcccggcacagtaactcatgcctgtaatcctagcactttgagaggctgagacgggtggatcacttgaggtcagaccagcctggccaatatggtgaaactccatctctactaaaaatacaaaaattagctgggcatggtggtacgcacctgtaatcccaactacttgggaggccgaggcatgagaatcgcttgaacctgggaggcagaggttgcagtgagccgagatcacaccattgcattccagcctgggcaacagcaagactctgtctcaaaaaaataaaaaaagaaaagaaaagaaaagagataaggaggccgggtgtagtggctcacacctgtaatcccagcactttgggaggccgtggtcataggattgcttgagcccaggagttcaagaccagcctgagcaacatagtgagaccttgtctctacgaaacgtaaaaaaattagccaggcctaggccaggcttggtggctcacgcctgtaatcccagcactttgcgagaccaaggcaggtggatcagctgaagttgggagtttgagaccagcctgaccaacatagagaaacccagtctctactaaaaatacaaaattagctgggcgtggtggtgcatgcctgtaatcccagccactcaggaggctgaggcaggagaatcgcttgaacccgggaggcggaggttgtagtaagctgagatcgtgccattgtactccagccttccagcctgggcaacaagagcgaaactctgtctcaaaaaaaaaaaaaaaaaaaattagccaggcttggtggtgagcacctgtggtcctagccacttgggaggctaatgaggaagatggcttcagcctaggagtttgaggctgcagtgagtgatgaacgtgccactgcacgcagggtgagagagcaaaaccctgtatcaaaaggaaaggaaaggggaaagggaaaggaaagggaaggaagtttctgcaggaaagggaaaaatggggtgagggtagtttttgctgtgctgaactatatacagaaaggagaggagaggggagggaaggggaggggagagaggtttctgcaggaaagggaaaaatggggtgagggtagtttctgctgtgctgaaatacatacattatatcccagccctgctttctccctagatgtttagtgtcacagatttctaggaagttctccttgatgtgactttcctcgctgtgctgcagtttcaagtctttttcttttactatattccttaatgtatcctggaaagagtctgttcacacccacccacctaaggctcttaacaaaaagactgtacttatattttggatcctgattttaaaaatcataagacatttttccagatattcatgaaattttatatggactgagtttgataattttgtctagcatgaaatgacattgtgcttatgcaagaaaatactcatacattttaaatttgtagggttaaaataacacgatgtctgggatttgcttttacatactttagccaaaacaaaaacaaaaacaacaactagtaaggataaacaaagcaaatgtggcaaggtgttgatagttgttggacctgggtggggcagatggaggtccagcatatccttttcttctcagacctctcttggtcagttacaataattttgtcttccctgtccccatccccaatctctgccagcctctaatccatcctcctcactgcttgccatcgtgatctttctaaaacacaaatttgatcatgttcaaaagtaaatttttttttttttttgagacggagtcttgctctgtagcccaggctggagtgcagtggtgtgatctcggctcactgccacctccgcctcctgggttcaagcaattctcctgcctcagccccctgagtagctggaactacaggtgcccactaccacgcccggctaatttttgtatttttagtagagacagggtttcacttggccaggctggtctcgaactcctgaccttgtgatccacctgcctcggcctctcaaagtgctgggattacagatgtgagccaccatgcctggctaaaagtaaattttatggtatgtgaattatgtcttgatttaaaacaaaacaggcgaggcgcagtggctcacgcctataatcccagcactttgggaggccgaagcggttggatcacttgaggtcaggagtttgagacaaacctggccaacatggagaaaccatgaaacatggcgaaactaaaaatacaaaaattagttgggtgtggtggtgggtgcctgtagtcccagctacttgggaggctgaggaacgagaattgcttgaatccaggaagcggaggctatagtgagccaagatcacgccactgcattccagcctagggggcagagcgagactccatctcaaaaaaaaaaaaaaaaaaaaaaaaagagtaataataaataaataaacaaataaataaggggttttttgtgtttttttttttttttttttttttgagatggagtcttactctatcgccagctggagtacactggtgcaatctcagaatctcagctcactgcaacctctgcctcccgggttcaagcaattctcctgcctcagcctcccaagtagctggaactacaggtgcgcaccaccatgcccggctaattttgtatttttagtagagacagggtttccccatgttggccaggatggtctctatctcttgacctcatgatccacccgcctcagcctcccaaagtactgggattacaggtgtgagccaccacacccggccaaataaatgagttttaaaaatgcacttcagccgggcgcagtggctcacgcctgtaatcccagcactttgggaggccaaagcaggcagatcacctaaggtcgggagttcgagaccagaccaaccaacatggagaaaccccatctctactaaaaatacaaaattagcctggcatggtggcacatgcctgtaatcccagctactcaggaggctgaggcaggagaatcgcttgaacccaggagacagaggttgcaatgagccgagatcatgccattgcactccagcctgggcaacaagagcgaaactccatctcaaaaaaaaaaaaaaaaaaatgcacttcgaatgtgagaatgaatggagtgacatgaatagagtgttatccctgagaaggaactgaaaggatcctagggcccttcatggcacattccttttagtacccagaaaccaggactggcttggtgtctcaaggcaactcagaaccaaagcctggaacaggcagctgtatccagagtggacagaagcccagagacttgactgctggagaggtaggaacttggaagttccaggggagggcatggtgggagtgggatgaggaaaaaagcaagctgaactgcatcgagtgtagcttgggaagaaaaggaggggaaacgtatacagggaggggaagcccaggagtcccagctaatgtagctttccttcccaggtggtcaagtgtccctcaaggtcagtaatgatgggcctacactgattggtgcaaatgcctccttctctattgccttgaacttccctggaagccaaaaggtattgccagatgggcaggttatctgggtcaacaataccatcatcaatggtgagtacttctctattctaggtccttattcctagggctcaggttccctggtatgcccagtgagctcagggaatgccccttccttctctacttttttttttttttcttttttgagacggagtctcgctctgtcgcccaggctggagtgcagtggcgcaatctcggctcactgcaagctctgcctcccgggttcacgccattctcctgcctcagcctcccgagtagctgggactacaggcgcctgccaccatgaccggctaattttttttgtatttttagtagagacagggtttcaccgtgttagccagtatagtctccatctcctgaccttgtgatccgcccgcctcggcctcccaaagttctgggattacaggcgtgagccatcgcacccggcctcctcctttaatttttaaaacaagttatatgtgtaatacatactcattgtagttaaaatttaaaaacacagagaaggccgggcgcggtggctcacgcctgtaatcgcagcacttcgggaggccgaggcgggcggatcacgaggtcaggagatccagaccatcctggctaacacggtgaaaccctgtctctactaaaaaaaaaatacaaaaaattagccgggcgtggtggcaggcgcatgtagtcccagctacttgggaggctgagacaggagaatggcgtgaacccaggaggtggagcttgcagtgaaccgagatcatgccactgcactccagcctgggcgacagagcgagactccatttcaaaaaaaaaaaaaaaaaaaaaaacagaaagcaaaaagaaaagaaaattacagttgtagtccctgctacttagcagtctcaggtgggaggatcatgagcctgggaggtcgagactgcatgatcacgccactgtacttcagcctgggtgacagagtgagaccctgtctcaaaaagaaaaaagaaaattacagtccctaaagtggaggacagcagaattcaggggacctagaagttgaacagacctatatttaaacttgtccttgatatgtgaccttgggcaagttacttgttttgtgtttccatttctttttttttcttttcttttcttttcttttctttttttttttttttgagacagagtctggctgtgtcgctcaggctggagtgcagtggcaggatctcagctcactgcaacctctgcctcctgggttcaagtgatccttccgcctcagcctcctgagtagctgggagtagcctcccgagtagctgatacaggcgcatgtcaccatgcccggctaattcttttgtatttttagtagagacggggtttcaccatgttatccaggatgactcaaactcctgagatcaagtgatctgcccacctcactgtgtttccatttccgaagataaaaggattgttgtaaggattagaatgtgataatatgtgtaaagtacttaatgtagtgtctgctctagcctacagtaaaggctaaataaatgctatctagtgctgttatttatttatgtatttatttttgagacagagtctcgctgtgtcgctcaggctggagtgcagtggtgcgatcttggctcactgcagcctccacctcccaggttccagcgattctcctgcctcagcctcctgggtagctgggattataggcttccgccagcacgcctggctaatttttgtatttttagtagagacagggttttaccatgttggccaggctggtcttgaactcctgacctcaggtgatttaaccgcttcagactcccaaagtgctaggattacaggtgtgagccactgcgcctggccccctagtgctgttatttttattccactagctagagcaaatcactctaaatattttgatatgtggctatatatatatacatatatcttctttttcttttatttttcttattttatttatttatttatttatttattttaaagtcggggtccttctctctctcccaggctggagtacagtggtgtgatcatagctaattgcagcctcaacctcctgggctcaagtgatcctccttcctcagcccctggagtagctggaactacaggtgcataccaccacacctggctaattttttttaaatgtattttgtagagacagggtcttgctatgttgatcaggctggtcttgaattccatgcctcaagcagtcctcccacctcagcttcccaaagtgctgggtttacagccatgagccaccacacctggccaattaaattatagcttctggccaggcatggtggtgcacgcctgtaaacccagcacttcgggaggctgaggtgggaggattgcttaagcccaggagttcaagaccagtcctggcaatatagcaagaccctgtctctacaaaaaaataaaattagctgggtatggtggtgcatacctgtagtcccagctactcgggaggctgaggtgggaggattgcttgaccctgggaggttgacactccagtgagctgtgatcacaccactgcactccagcctgggcatcagactaagaccctgtctctaaaaaaaaaatgtagtttccacaccctcaacccccaactaccaccccaaatggttatatcatggagaatgtactttctagctagggaatattcccagagcccctctctgataccctgggagcaattttaggggttttgatatacaaaaaagaatgccagggtttgagagtgactctgtatttatctttcagggagccaggtgtggggaggacagccagtgtatccccaggaaactgacgatgcctgcatcttccctgatggtggaccttgcccatctggctcttggtctcagaagagaagctttgtttatgtctggaagacctggggtgagggactcccttctcagcctatcatccacacttgtgtttacttctttctacctgatcacctttcttttggccgccccttccaccttaacttctgtgattttctctaatcttcattttcctcttagatcttttctctttcttagcacctagcccccttcaactctatcataattctttctggcaactcttcctcaattgtagtcctaccccatggaatgcctcattaggaccccttccctgtccccccatatcacagccttccaaacaccctcagaagtaatcatacttcctgacctcccatctccagtgccgtttcgaagcctgtccctcagtcccctttgaccagtaatctcttcttccttgcttttcattccaaaaacttcaggccaatactggcaagttctagggggcccagtgtctgggctgagcattgggacaggcagggcaatgctgggcacacacaccatggaagtgactgtctaccatcgccggggatcccggagctatgtgcctcttgctcattccagctcagccttcaccattactggtaagggtttaggaaggggcaaggccagttgtagggcaagagaaggcagggaggcttggatggactggaaaggagaaaggtgaaatgctgtgcaaacttaaagtagaagggccaggaagacctaggcagagaaatgtgaggcttagtgccagtgaagggccagccagtcagcttggagttggagggtgtggctgtgaaaggagaagctgtggctcaggcctggttctcaccttttctggctccaatcccagaccaggtgcctttctccgtgagcgtgtcccagttgcgggccttggatggagggaacaagcacttcctgagaaatcagcctctgacctttgccctccagctccatgacccnagtggctatctggctgaagctgacctctcctacacctgggactttggagacagtagtggaaccctgatctctcgggcacttgtggtcactcatacttacctggagcctggcccagtcactgcccaggtggtcctgcaggctgccattcctctcacctcctgtggctcctccccagttccaggcaccacagatgggcacaggccaactgcagaggcccntaacaccacagctggccaagtgcctactacagaagttgtgggtactacacctggtcaggcgccaactgcagagccctctggaaccacatctgtgcaggtgccaaccactgaagtcataagcactgcacctgtgcagatgccaactgcagagagcacaggtatgacacctgagaaggtgccagtttcagaggtcatgggtaccacactggcagagatgtcaactccagaggctacaggtatgacacctgcagaggtatcaattgtggtgctttctggaaccacagctgcacaggtaacaactacagagtgggtggagaccacagctagagagctacctatccctgagcctgaaggtccagatgccagctcaatcatgtctacggaaagtattacaggtaagagtatcagtgcgaatgaggttcacggaggtggggtaccctactctactctgtaagtcttacccaggactcagatgttacccaatcctttgcttagcactatggtcccctcagagttctcactggcctggctataaagccctccagtctctcttaatgacatggaataggtctggagttcaggaaaccaaggtcttcccctaggccatgaggaaagagcttgttgctttctctactgctgagaacggttggcgagaccagggaacagactgtgatcatttatataatatttatagctcattttctgttcaagcataaatgcacgaaaatccttcccagattccgagatcctgatccttccatttcccaaccctggattcccatcccaaagcaaaaagggaggaatgaaacagtgatgcttaaatgagttaacacacgttgaatgtctagcctaggacctgacatagtgtggggtgtgataaacatttgaggattttttaaaactccaatgccacccctaactgtgactctggaggagtcattttcttcttctgggcctcagtttccttatctatagaataaggtttcccaggtcttatctgattccaagcctgtgactccagaatccagtaactctggttcaacctgaaaaaatgcctgcttggcctctgcctccagatgagtcatctgtctcttgatcttgcctccttgatcctctcctgccaggttccctgggccccctgctggatggtacagccaccttaaggctggtgaagagacaagtccccctggattgtgttctgtatcgatatggttccttttccgtcaccctggacattgtccgtgagtcttgcctactttggtggctgatggaggcagctgtgtgctacctagggctggtcagtggaagcacaccttgggaggaattactcacctagataggaagaatacccaaatgccagagtcctcatttgaaagcacagggatgggattggtggagcagccctggggcttttctgtctctgggcttttggggaggccaggtagaggaatcctaatttgataagcttgcaactctgcagagggtattgaaagtgccgagatcctgcaggctgtgccgtccggtgagggggatgcatttgagctgactgtgtcctgccaaggcgggtgagtgtctcactagtgtgctggtaactctttggttgactgtttctccgctctctggcatttagtgtcccttcccagatccccttatatatgctgacacttcttccaggctgcccaaggaagcctgcatggagatctcatcgccagggtgccagccccctgcccagcggctgtgccagcctgtgctacccagcccagcctgccagctggttctgcaccagatactgaagggtggctcggggacatactgcctcaatgtgtctctggctgataccaacagcctggcagtggtcagcacccagcttatcatgcctggtaggtccttggacaagagctaagatgaggaagggagtggatagagggcagctggcaagcagcagacactgagtgaagcagtgcctgggattcttctcacaggtcaagaagcaggccttgggcaggttccgctgatcgtgggcatcttgctggtgttgatggctgtggtccttgcatctctgatatataggtaagggcctcatcacacagctcagacccccttatcccttattatcactactcacttttcctcaaggggagaagaaaccacctctccctttgaggaagcatggtgtccaggaaagagcccaggcttttaagttagacagacttgggttgcagtcttgcttgtaggacctgggggaagtagcttaacctgtctaagcctctgaaaagtaggtaaactaatacttgccctgtggggctgttgtaaagattagaaacaatgagtaaagcacctggctctgaagcaagagtgcaataattgatattaatgactgttgttaataatatgaagagtgggggcagtttgggtaaactgagttttctttttttttttgagacggagtttcaccctttttgcccaggctggagtatagtggcataatctcagctcactgcaacctccaccttccagtttcaagcgattctcctgcttcagcttcccgagtagctgggatttcaggcacctgccaccacacctggctaatttttgtatttttagtaaagacagggtttcgccatgttggccaggctggtctcaaactcctgacctcgtgatctgcctaccttggcctcccaaagtgctgggattacaggcatgagccaccgtgcctggcctggggtgaactgagttttctacctgcaagaagggcagatcccccaggcctggggtggcatggtcctcaggcaggaaagcttacggggtgagggaggaatggacagaggttaccacagaaataagagagggtaaaccctggaggtgaggagaaggggaggaagctaggatcaaggctaagcagactgggatatgggtgtgttcccttctttggagaagcacagacaagctacctttgtccattgctaaccagtttaccccttctcccaatatcaggcgcagacttatgaagcaagacttctccgtaccccagttgccacatagcagcagtcactggctgcgtctaccccgcatcttctgctcttgtcccattggtgagaanagccccctcctcagtgggcagcaggtctgagtactctcatatgatgctgtgattttcctggagttgacagaaacacctatatttcccccagtcttccctgggagactactattaactgaaataaatactcagagcctg

SEQ ID NO: 231 - DNA, 118412 bp, Homo sapiens
  misc_feature (1043)..(1045): nnn represents ata insertion variant
  misc_feature (1080)..(1080): Marker 217468 n = a or c
  misc_feature (1106)..(1108): nnn represents tct insertion variant
  misc_feature (50575)..(50575): Marker 951497 n = g or a
  misc_feature (106523)..(106523): Marker 278  n = a or g
  misc_feature (107348)..(107348): Marker 217473  n = g or a
  misc_feature (107404)..(107406): n represents cga insertion variant
  misc_feature (107830)..(107830): Marker 386  n = a or g
  misc_feature (117834)..(117836): nnn represent ctt insertion variant
  misc_feature (117839)..(117841): nnn represent ttc insertion variant
  misc_feature (118064)..(118064): Marker 217480 n = g or a
tattgagttcttcaaacattgtagcctctttatggtctctgagaaataactaccttaaacccataatctttaatacttcctaaactttcttaataagagaagctctattcctgacactacctctcatttgcaaggtcaaatcatcattagttttgtagtctattaactgggtttgcttaggtcaggcattattattactaaccttattgttaatattctaaccataagaattaaactattaatggtgaatagagtttttcactttaacataggcctatcccactggtgggatacgagccaattcgaaagaaaagtcagtcatgtgcttttcagaggatgaaagcttaagataaagactaaaagtgtttgatgctggaggtgggagtggtattatataggtctcagccaagacatgtgataatcactgtagtagtagctggaaagagaaatctgtgactccaattagccagttcctgcagaccttgtgaggactagaggaagaatgctcctggctgttttgtactgcctgctgtggagtttccagacctccgctggccatttccctagagcctgtgtctcctctaagaacctgatggagaaggaatgctgtccaccgtggagcggggacaggagtccctgtggccagctttcaggcagaggttcctgtcagaatatccttctgtccaatgcaccacttgggcctcaatttcccttcacaggggtggatgaccgggagtcgtggccttccgtcttttataataggacctgccagtgctctggcaacttcatgggattcaactgtggaaactgcaagtttggcttttggggaccaaactgcacagagagacgactcttggtgagaagaaacatcttcgatttgagtgccccagagaaggacaaattttttgcctacctcactttagcaaagcataccatcagctcagactatgtcatccccatagggacctatggccaaatgaaaaatggatcaacacccatgtttaacgacatcaatatttatgacctctttgtctggatscatnnntattatgtgtcaatggatgcactgcttgggggatntgaaatctggagagacattgattttnnngcccatgaagcaccagcttttctgccttggcatagactcttcttgttgcggtgggaacaagaaatccagaagctgacaggagatgaaaacttcactattccatattgggactggcgggatgcagaaaagtgtgacatttgcacagatgagtacatgggaggtcagcaccccacaaatcctaacttactcagcccagcatcattcttctcctcttggcaggtaagatatgctagatatacgatgtcagagtagggaggaaccttaacaatcacttcttcaggcagggtataaacttctcacctgaacactcattgcagcccccatcaaggacagaaatggtgccctgttaagaactctcaatgtatcttgtatttttcctttatagcacactttagatatttgtgtaattatttgtttaatgacttctactaggtttctaaactgcaatgaacagagtacttgattcattattgcatttcccagaacatagtatggtgcctttaaaaatggcaatagtgcattatgtattttgtgaattgaataaatgagtgaatgaatgaatatctggatgattaaaaaaacaaatgatatacactaatgtctctgaaaaataaaattattattcacaacaggattcatatggtgtacaaattaaaaatgcaaattcctggccttatcccagactaattggtcagaatcttcaggagagagtcccgagaaggcacaatttactaaatgtctatggtgattcttttaatcaggaatgtttgggaaataattattggattagatcttcatttttgaaagtatgaagatcctgaggcttaaacaggtaaataatgaagatggctaatattcattgaacatctagcatgtgcaaaccccgtggcaagtgtttttgtgcattcgttcatttcatgctcttatcagtctttccctattttagaggttataaaggtatcaggtaacttgtataagatcatacagctaataagcagcaaaaaaaaaatcacatttattctctaatagtccagctgtatgaccactgtatcctatttccaaggatgtgactgctgtgatatctttagctaaaggatctggttcattctgtctcactttttctttaggctgcattagaagttagctttctttctcagtccttgaaaactttagataaaatatgaagcattactatttggaattgaattcctatttcatctattctgaatttttcattctgaattaggggcaaatggtaaccaaagaaatatgtgcttaattatttatcattttaaaaccatatgttaaaggaatgcttttctgcctgtcttccaaaaatttctaatacagcacttttgactagcaatgctctatgaaattaagcccaatatgtgaatgggatgggaagaatcttgcactcaatttcccacaatctgcagttttgaaatgtagatggccttctccgcccaaccaagtttgtaccccatcccaatggagtctactgaagttcatttaaaaaatagccactgtataatttctggtgttattagtcagctatttaccaaatgtaatgggttttgtgcaggaaaggctagaaaaaatgtgcttggaaaaaaatctatttcaataagctttcagacctcctaccttaatctataatgtgcaaactctcatctagctcttatatcctctgttcctgtttaaaaaactgccaggattggacatgggattttcagtcagttatgatgctttatttaactatgtggcttaacttgacccagaaaggttggaggactgtctaaattaccaaaataagctgcaacatccacaggaaatcttaatagatagatacacattaatttttaattacatgagatgtgtaataccagatgctatccacaactgtatgagtattattttcctaattacttattaattgtcaagcagaactttttcctttttctctcttcatgaatgtgttcaattttaatactctctagaaaaaaaaaaaagtgtgtcaagtcagtaagccctgaactgaaattgatacaattatcaacttcaaccttgttctatgattaaattgctgtgtagaaacaggtttcaaaaataaaattagaaaacagagtggaaggaagatgactgaagagaaacaagcaaaccacagtttaagaaaggtgaaatgagcatttgctgctcacctactatgttttagtagtgtcaagggcttattagtggcaaaggtgacagtcaaaccccactcacattggctgtttccattccttcacacagcctctctggttacaaagtccttaaaatagttaagatcgattgcttacattgctttaattcagagttctcaatgtcaaaatcacctaggaagcttccaaaaaaccatttaaaaagtaaaaataaaaaactgttgcaaggtttttatgcacctaatttcttgccagaaattcagattcaggtggtctcctgtgaggttgtaaagttcaagagtctttttttttggcagtggtgcaatctccatacgctgcaacttccgcctcccaggttcaagtgattcttctgcctcagtctccctagtagctgggactacaggggcctgccaccactcccagctaattttttgtacttttagtagagatggggtttcaccctgttggccaggctgctcttgaactcttgacctcaagtgatctgtccgcctcagactcccaaagtgctgggattgcaggcctgagccatcaagctgggccttcaagtgtttgcatttttaaaccctcattttgtgattctaatgtgcagccagcactgagaatcattgagttaatggagattgttttggtatctttttactttcactttacaaaaacgcatgttctgtaataaacacaccattaatttgaatgcctttgtccaaattgaatgcttaaattaagaactagactatttgtgtgagatgagatcaaatagtttctagattgagttaagaccttccaaattagctaggctgatgcacctttcacataaagccttctttttttattggtttcagatatcattttacttgaccccaaaattgagatttgagagatttgatagcatttattaactctgagctgagagatcttcaattttatttagggtaacctgtgcattttattaaaaaactatagaaaagcctaaaatggtaggatgattgtccaaagtcacacatctgaggactaaaaccaagcggctctgactgcagtgctttttaagtcaacaatgttatttcttgtttataaggatccatttaggttcagaaggggtcaagtaacccgctaatttctgggtgtataatttgacatttgatcacgttgactcccttaaaattgtcctgccccagacaacataggcagacacagtgatgtagtccttttaatttatatcataatgaaaatattctgagacttttactgatccacctctgttactcaggtagagttgaccctctccccgtctttgtgctatcattgtactttatacagatttgtatcatagcacttgtaacttttcattacatgtagtggttttccagcctgtctgtatctgccagcctgtcagtcgctccaaggtggtgatcatttctaaatatttttgtatccacagagcacaggactataatatacacatggaacaggctttataaatacatgctgaatttaacatcaaagaaacgttagctccaatgctaacatacataaaatattaaactctgcatgggtagatttctaggaccattcactgcagtttttttatagcactggattcccaatgccaaggatacaacaatgtcaacaatagccacttactcaaatttgggtataatatatcttgtgtcgttctctctggtagttccatatgtatgtctgcgtgtgtgcatgcaaagaaagacaatacaagagagaagatgaagcaaggtgcaacatagctgagtgtgatttaaatgaagttaatatttattggtcagagttttctgttaaatatgttaaaatcaggtaattaatttatttggaaatattgtgttcctaattcatgtctgttgtttgctcatttatttaactcccaaagctttaaattaggggccatgtttatcatcaattaaaatagttcattatatttggaggtggagggttgcttaataacatttaagtacaaactacccatgctcaatataattagatctaatgttatgcaaccaacagatcagctagctacaaaaataaaaggggtatcaggaataggtgtcatcatgaacagaaacaaagaggaaaaaacatttcctagctgatacacatgagtgaattgtgaccagggaattcactcatcaggtgaaaagcacatcacatggaagcaaagagaagaaaaaaagtcacatttcagcagagagtcatgggttttaggtaaccatgacgacagctcagtgaaataacagcttctcttttttctttatgaaaaagattttgtggaatgtcatacggtttacattttttcccccagataaacctctaatgctataacaaaatctttgctcccaaaagcttttaatatctggcagtttattgctatttctttaaatttaagagaacagtatttaggttcaccttcctcattaatatatctatttcttctatctccccttttttctttgacttggaacacttgatcgtccccccagcatatgttataaatcacttgcgttgaaatagaaaaaaaacagagtcatcatcagaacatccaggctcaaattctacccctgccatttagtagacgacattggaccagttatttaaaatctttgacctttgttttttccaaagagaaaaaaaatgaggtagaattaccatctatacatgttttgtgtgtgtgctaataggaggattaaatggaatgggaaacagaataatgtagtggaaagagtatagtcttttcagtcacatcagcatgaatttgagtgaactttcatacttacttagctacaagaccctaagttacttaattattctgagacgatttttgtccctaaaattagaataatataggttaaagcattactgtgaagggattcaataagatgtgtttatatggcttgtttaggatctgacctattgtttgagtttcatgtgtggaaataatatatttttaaatgatacatcaaagttagatataataatgaatattcaaacagtgttatacacccaaagttaaaaacaatttggtgacctgcccaatggtcttgttttcaaaaataattatgatagttgtcattattaaacactttacacttggcactatgctaagtgctttatacatgttagattatttgatcattgatagaaacgtataattcccatttacagatgaaaaaacttaatacccagagagcttaagtaacttgcccaaggccatgtaactaatagggtcagtattggaaaccaggtctttctgactagaatcttcatgatcataagcacaatgctaatataatttctcctagcctgcctcctctcctgtatgcagtgtaaagactaaggtttggagtttttcaaattatttctggaaccagggtagattttctcctcgttagtaatacctccagtcatccgaacacttagtcacttggcagttggcatttcagcaaaaatagtttcattcaagcctctctaatttaactgagttggctgtaggagtctttaaggcagcaggatcttttgaaaatatcctgagattactcaaagaggaataaaaatgatttagtctacatacttgtagcgtccagttaacccaaattataaaagcatccaacatattacattcaatgtaaaagttaggttagttttattcaaccattcctaagccattaacacgtcataattaatgtagtgggtattgcttcagaataaggaaacttgtgtttcagtgctttggttttgactctaaatatcatatggccctaagacaagtcactcaacagttctagttctcaattatatatggataaaaggatttaggaacgttatgaggtataaggcaaactagaaactggcatttgttgaaacagaaattatttgttgaatagtttcttttcgtatattatgtcatagtacagtttaaaaaaattgagatttagcaagtctaaaaaacatgttcattgccagtaagaaaattagccagaattgaagttgcatctacctgtattacggagcccaattttttctctaccacacaatgcataaattcttaagttatgtcttagtgaccaaaaattaagagtaggttctctaagcatttcttatctaacacagtagcagccatctatggtggggggactgcccattcaattctatttgagatgactacatttgtttatacatgcttatagatagcaaattcagtgggataggaggaccaataaaatagtcttgattattttcaaatgtgatgcaaacagttgaccgggaagacattttaccttcaaattattattctatacgtctcgcctactgttcacaaaattataaatcataacatgggtctttatatcccgttagccttttgtagtcttccacagtctggcttagtatcctcatcatgaaaatagagataaaatcataaaaatccacagggtagttgtgagaatttctaattttaatgtatatggagatatctcccttatggcctaggacagagtagtgactcaatataggtttaaaaaaataagttctagaaatatattctatggtaaaggtggtaccaacaacatgaccaagaaaaatgagcactcaacacatactttttgtaggagattctttggctcatccactgactctgttcattcatccaacaaattcttactgcacatcaacagggtgctagaaactgtactagattctgagagaaaagaaataaacaacaatgtgaaaataaatgtgtcttcatgaaggatgcgtttttataagggacgtaacaatcattgtttattagagacgaaaatgagtaagtgtaagttgggtaaagaacaatgttatctccctagtggccccaagcctcccacggaagcatgcacctgttgtgaacagtcaatgacggcagggtggactctcctgaatttcatcttttgcttcgaatgtatctctcactacctaattactctattttattaaatctaaggtatcaatgaatttaagtgatgcattcatttatgtaccactaagaaaaataaaaaaatatatttatcttaaaagccctttttggcttacgtagtcacatatttttatcatagtttattcttctgcctccatataaatgaaactacaagaaaaataatttggtgaaggattcctgaaatgtttttacattcagagtcagccccttttgagttacttttaaagtcagagtcaacaatgcctgtttttactaattatttgctttggccttaaagaatgggtaggatattagatgcatggcaaagagtgggcatgcttagccacaatcagagtcatggaatggagaagcacaagcagtgtccagagaaagtaggccatctgactttagcagcaggatcacacaggatgtgagcacatggagaatggttgcctgactcgagatattttttggaggtagaattgccaatataaaagcagtgccatcgcacaatgctccatgctcagaagcagaccctacatttgaggtttaatgatctgtggtcttggtgttgaaattcttattaatcttatctttgggtttgtgctttataagtgaagttatagggacaatggagcatatgcttggttcatatgcatcctgcagaccttttgttctttgttttcctgggatgggtcttggctaccactacccatccaccagccctacctagtttccacctcctcaccctctgcccaaggccactggtgggaggaaagaggtcaacatttcactgtcactctccatccctggtggggtccttggtgcaagcaaaaagaggtgtgaggttgggtgttgatcccatgatttgttggttcagagtaaaacagaggccttctctaccgaggctggctgcaccttagcacggtgcacaggtgattacatatagacctctcagccagtattatggactgaattgtgtctcccaaaaatgtgtgtgttgaatccctaatttccagtgtgactatttggaggtaggtctttaaggaagtaattgaggttaagtgaggtcattaacagtggggtcctaatccaacagtactgatgtcctcataagaagacaaaaaagacagagccatctctttctttgtgtatgcgtagagaaacggcaatgtgaagacagagaaaaggtttcctctgcaagacataagagaggcctcagcagataccttgatcttggacttccaaactcatgaactttgagaaaataaatgtctgctgtttaagccacccagtctgtagtattttcttatggcagcctgaactaatctacccacctactcaaacaagtcttagcatggaggtttcaatccctagggagtcacctattcactatagactgagactgtgggatacctattccctgtagattgagaaagtgaatattgatttccctacccccagccaaggcctcaacatttatctggtgctgcaaattgcatagccagtcctgcctagagcaccacaatatttacaggtaagacagacgaggaagagctagtaggacacaccaagtagtaacagcaagagagaaaggcaaaaatcaaaggggatgtgattatagaaatcagtacatagaggaatgtgttttgtgaaaatgaaagtggtcaactgtgcctaatgctatcttaacatggggacttgcagggataattggattttataatatggagtctttgaaggttcataacaaactcattggccaagagatgacaggggaagatgactagagtgcctttatgtgggaatgggtagccaggaaatggaattttcatttaagatacttgctaagatttaagctttaaatcatgtagtctatattcaaatattaactccccccgttttataaactataaatgtttgatgaagccacttaacctctataagcctgttttctcattgatgagatggaaatatcaaaagaactcctctcatagaataattgatttactgttattgaatttcaaaccaaagttttcaaatgtctttgtgtcaggcaccataccattacacaataatacatagtgaataggatacagtttatattttgatagagtttatcacctaacaggtatgtttataaagattaaatatatacaccatattgccttattcattgatttaaaaattcatttacaaaaatattagcactttaagtattgagtattttatgtaacttatcttctagtggagtaggtctagtaagtgtgtgtggtgagacagtaaaacattatatataatattttatttaaaaaagttaaaggagttaaaaaatataataagttatatatattgttttactgtctcacccactcacacttcctagacctactccactagaaggtaagttacataaagtactcaatacttaaaatgctaatacttattaaaaatgtttaagtcaatgaataaggcaatatggtatagacattaaatcttcatgaccatacttattagactgtaaactctataaaaataaaaactatgtttatcgtgttcagtatgtattcttgtattctggtataatgcctgacacatagacattttaaaacttcggtttgaaaagcagcaacaataaatcaatcattctatgagagttcttttgattacatagtttgttagaaggtgctaagtgcacagataaagcagaaattagtggtgtacagtaaatgtttaataacttgttctcaatggaggagtgggaaagtagggagagatgattctgatttgccaattgttgtggtgtaaatactgacaatggtagatttccatctaatgatgggatactgctgaacattctaatattgagaagggttacacactttgaacttttgctagctagtgctaaccagctctacaacactgctaaagtgggtaaggctgaatatgatgttaaatagatgtttagtgtagatttcattaagataatgaagatatgaataacccaagcaggtatcaagggaaaacagtctacccagaaaaaataaccagtacaggaacatgttgcataagagtgattggtgagttttgggaagggcaaagaggccagtgaagttatagaagagagggaaagggaaagatcagtaggaaataatgtttgcatcagtcaggatctcagtaggaaatagatacccaaaccaagttatattaagacagtttatttagaaaaatttgatcaaggtttagggaaaccaacaaagaacaacatcctgttgtcagccacaactgagatacaggactagaactctctattttattttaacctagaacctacttttaaaaattttttaatgttgagttctgctagactagttataaaagcacaaaatacactaaagatgaagttggaaaacttgggttgccatcacaacactgccatttatttgccatataacctgagaaatgccacttaccctctctgagtctcattttccttatttgtgaagcgaaatgtattgttttgtgatgtaaatgaaacaatgcatgtgccgtgttttcttaaaaagttttgcttatagaaaggtgagaaattcttatttttaagacggtatttctacaatgaaaatcaccttggttctagctaaaggatcagagaaatttcttttcttaaaaaacaatcaaccacgagtattgtactgcacatcaaaaaaaaaagggacaataataggatattttatgaacaaaaagcacaaaatgaaactatttctagtccttgacattctgaatataatatagattaatgtttttaaagctactgtttattgagtgttttctgttggtcatgccatgtgctatgggctttatatacagtaagatgcctatctctattgttaccaaccccagcctcagcacttggcacagtgcttaatatataataggtgtttaataaatattttattttctataactatgtgaggtagttgttattatcttcatttgatagatgaggcctagacagttaaatcattttcttaagtggtagatgcaacactagaatcctgttccaggttttaacttttatggctcattctgtaaccttcaaaaagctaattctaaaatacagtagtatgccacacaatggcatttctgtcaaggatggaccacatatatgacagaggtcccacactactataatggagctgaaaaattcctgtcacccagtgacatcatagcagtcataatattatacacaatgcattactcatgtcttcgtggtgatgctggtgtaaacctactgaaatcccacttgtataaaagtctagcacatagcattatgtacactacataatacttgataatgataataaacaactatgttactggtttatgtatttactatctatattttatcattattttcgaatgtacttcttccacttataaaaaagtaagttaactgtaaaacagcctcaggcaggctctccaggaggtgttccacaaaacgcctggatgttttatagagattgttatagagatgatagctccatgtgtactattgcccctgaagattttccagtgggacaagatgtggaggtggaagacaatgatattgacaactttgactctgtgtaggcctatgctagtgtgtatgcttgtgtctcagtttttaacgaaatttcaattatgtttataataagtaaaaaattaaatagcataaagcttataggctaaggatataataaatatttcctacagttgtacaatatgtgttttaagctaagtgctattatcaaaagactcaaaaagttttaaaaaattaagtaaaaaagttacaggaagctaaggtgaatttatcattaaaaaagaaaaatatttttataaatttaatgtagccgatatatatatagtgtttataaaatctactgtagtgtagagtagtatcttaggcctttatattcactccttattccctcacttacttacccaatgcaacttctagtcctgcaaggtccatttatggtaagtgtcctgtatatacaagtatgccatttaaaaaaaaattttatactgtatttttactgtaccttttacatgtttagataggtttagatgtatagatacttgccattatcttacaattgcctatagtattcagtacagtaatgtgctggacagatttgtagcctaggagcagtaggttttaccaaacagccaagatgtttagtaggctataccattctaggtttgtgcaagtacactgactatgatgttcacgcaatgacaaaatcacctaatgatggatttctcagaacatatccctgtcattaaagacacatgattgtagtaatctcctcaggagaagtctaacaacgataattaggagttccaacatttctgccttctcctactgactcagtggtggtgacaatttgtttaacatgagggtgttttgtacagattgtctgtagccgattggaggagtacaacagccatcagtctttatgcaatggaacgcccgagggacctttacggcgtaatcctggaaaccatgacaaatccagaaccccaaggctcccctcttcagctgatgtagaattttgcctgagtttgacccaatatgaatctggttccatggataaagctgccaatttcagctttagaaatacactggaaggtaatctctttcttttcacttttaattttttttctgaattcatatttacagtctcttatccaaagtcctaggaggtatttgagaattcagaattttctgagttgaccaagaatatgtgttgtatatacttatatcgacaatgaccctagctgacactggtcagcacgttataattcaacgtgttagcttcaggagccaggcatggtggctcatgcctgtaatcccagtttacttgggaggctgtgacaggtggatcacttgaactcagaagtttcaggctgcagtgagctatgattgtgtcactgcattccagcctcggtaacaaagtgagagactctgaggaaagaagcagcagcagaagcagaagaagcagcagtagcagctttagtgaaatatatgaatatattcatcatggtaataaatacaggcaataggcaacctaatggtgagtaaagtcagttttttccattaaaagagaaaaattaatttcatttccagaacattttgtattgtggaatttcagatataagtctgtggactgatactattttcctacgttttagtgttttagttttctcctgtttaaaatattctaggcagtgggttctttgaggtaagttcattcatttaactgtaataaggacacagcacataggtaaagcctccctctcattatcccttaagttttctgttcttcatcagagattacatctcatgatcttctctaactcctaaatatttatcctacaaatgttttcatcttgcttgcattttgcattcaaacatcgattcattcttttctgcttatagctgactcagtcatgaaacccatttcactcacataaatttgcattaggaaaacaaaatcacaaacaaacacaacaaaacaaaaacaaacaaaaaaaaactcaatcaagtcacaaatttaccaggagtttggggaagacataggcactgacttgtggcaaggcagacaactcaaaatttaacactagacatcgcagctcctaaaaggcctgtgacaccttaacatgtagaaaaactttcctctcttttgtaatcctttctccttgacttgttctttttttttcctttttgtcattgttttacaccccaacttttattattgtactgtgcagagtggttttactgtttcattcatttccctgttttattcaaaaccataatctcagggtcttacatccagaatcaattgaagcaaggcaagtctcatcctaaagatgaattctgttttccagctatgaaaatagaaattaggtttattcttctatggtaatattcatgattaactttttaaagtaatcaccgtatccaaaacaccatgtcaaacactttgtatggcattaattcactcaattctaataactatcccctgaggaagattgtatttattattcccacttttaagggaggaaacattatcagagatattcatcttttggttattgattcccattgaaaagtggtggagataatctgcccccagctttatcaagtaccaaagtccaagttctttccattgcactctgataatcaacagtgggttgagagtttctttaaagtggacaataccagtttggtcttttgacataagaaggcaagacataatgccaggtaatctcagagcctatataacaaatctaaggtacacaatttcaaagtcaccatctgggaggattgggtgacccactggactcttcagggattaacaacagtactcagaatgctgatattaatgacattgcaaagcgaagctacatctttaaggaaactggagcattttgctgttttttcagccataagtgacaaagcatatattttattattaagaagcatgggttagttgcagaaataaggcaggggaacatcactcgtctagggtctcaagtcaaagaaaaaaagtggctcaagatgtgtcaactcagccagtggttttcaagtgagagtctaatacacacaggtgaggagggaacagcagatttactacaaataatttgctactacaaataatttatgtttgtaaattattttttcccataatttattctcattcttacacactttagtaggcaaagtgtgtgagaagcaaacagatgcaacatagcatattgtctggcacacagtcgttcggtaagtatctgataaccgagtatgtaaataatagctagaatctttcaaattgcatctaaaccaccacttaccttatccatgcctgttgtatgaagtccatgtcatgagagaaaatgtgagaaaccattaagctcagctgctaagaagaacttttctttaccaggtacacattttaaaattattttttcttaaatttgtattcagcaataattttaagcttacagagatgttgtgaaaataaaagcaatacaaaaaacatgaatatatattttacccaaacttacttacattgtatcctgtttctctctctctctctcccagtctgagccattttaagggtaaattgcatagactgtaactctttacccctgaatattttagtgtgtatttcctaagaataggaatagactcatatagccacagaacagttttcaacttcagtaaactctatattgatataatgcttttatcaaatctactgtatatcagtttttaaaattagatataataatatcctcagtatttttcctctccaaaatagaatctagtctaggatcaaatagcatttagttttcatggttctttagtctgaaatatttccataaccttgtacatatgtgtctttatgtgcttgacagctctggaggatatagttcctcctcttcctcctcatttttttaatagaacattcttcattttgagtgtatctaatatttcttcatgactagatccaggtaatgcactattagccaaaattccacataggtgattatgcatctttctgagatggtgtcacatctggaggcacatcatgaccatctgtctcacgttggtgatgttaatcacctactccagatgtggtccaattttcccactgtataattatttcttccccttgtttaataaactgtctacatggagacattttaagactatgcaaatacctcacctcttatcacaatttcttctacagttggcatcgtcgatggttacaaatttatgatttttcaacttcagcactgcttttaaatttattagccaatattcaggattctactattagcaaaaatcctccattttttctatctatctatctatctatctatctatctatcatctatctatattaatggtatggagtaaaggctttccattgtttgatagtgtataactcattgatgtgcttaattatctttgtgttccaatggttccagaatttgcccatggtacaccttcaagctggttcttatgtctccatttcatatacacattttttaaaacacacattctctctggtaagcaaattattctagagcatcttgtacctacaatgctccaggcctgaaattagccatgactccaaggagtaatgttttctttcattgggaaggaaactcaagatcaagattcggaagcaagttttcctcaccagagagacacattttatctcacatcatgaataggacagggatgtggggtgtcttggtctataaggagtacacaagtgaatatagcagtgaggacagtaggacttgagaggagagcaaatgtcaaaattatactctgctctctcaataaatgcatatgaaatggaattgttacttttgattatacctcaaagttattgcttccttttctttcttggtctcgtgagaagtgtataatgcacttcccatggaacaaaatattcatagtcattgctaggacaaaggaactgttttatttttgtctactgaagttatttaagtaaactcagctttcctcttagatttcattgctgaaatagtgaagatgtgtaatttgtgaattgtgtaagagagaccacatggccgggtgtggtggctcacgcctgtaaacccagcaatttggaagtccaaggcaggtggatcacctgaggtcaggagcttgagaccagcctggccaacatagagaaaccccgtttctactaaaaatacaaaaattagccaggcatggtggcacatgtctgtaatcccagctacttgggaggctgaggcaggagaatcgcttgaacccaggaggcagaggctgcagtgagcctagatcatgccactgcactccagcctgagtgagactcttcccataaataaataaataaataaataaaaataaaataaaaacctcatgtttctagataaagcaaagaaaaataagtctgtattataagaagttttctgattaggttaaataggggaccctgtgcagtgtcagttgtcacattaaaacagaaattttctctcatgaaactctctatccattatgtcctgtatttcagagtttacaagagattttttgtttactttttcttttatttatttttttaatagcactgttggagaatgggacatggggactgaaatttcaatgaattggttaaaagtaatcaaactgactaggattacatcctagctcaaccacttcctagatgtgtgaccttgggtatgttatttaacttctcatatgtaaaatgtggataacaataataatgtataagattcaaagaattaaatgatgcaatacatgtaaggtagttagaacattttttcaacaaagggcacaacagtattgtgttaagctgtggttagttactgacaacttagcaatcattaacttctctggcaattagcttaacaaagtaagtttacagtgagtcctgagaaaatatattataatggcctacatttagtggaaaaataagggaaaggggaggatggaaaattcatgaagatagaaccaaaaataaataatgtttctggagacagataggatttcaggacaagtttcaaaaatgaggtgacagcaggaacaaaggtatcttctgttacccaaaagggaaaaaggagacaggaacaaggaacaacttcttggcgtttaatggtgtgtttccaattctgagcacagtggctgcctatagtaggtgctcattaagtattggctgacagactgataaatcaataaataaaagaaaactaccttcattgtaaaacttacatataccaagaatagtgtaaaatcaaattaatcataggtaggaccaagtcaatcttggttgatcatatattgtttcaaaccacccccttctaacaaatgcagtttatgactatggaaacttactattggaggagacttctcagtatattcagtccgacatcccacactatgctaagatgcccattgggataacaccaccatgtgacccatcaagggaaaacctaccccacaagggaaaacatgaagttctttaggctaaaccaaaatctaattccattcgacttaaatagagccatccatgaacctggtattatggtatactatggaagtacaaaaaaatacaaagatgacttacacagcttatcttactgaaaagctcaccatcaagtgaagaaactccacgtaaatacataaaatggtaattgatataaaatgaggtaggaacccagatacaccagaaatatttcctaaggaggtgaaaatagaattggatcttgaaatatcagtaactgctcactgagcagagaagaggaggagaggcatttccagcagagggaacaacatatgcaatgacacagaggtgtgaaagtgtgagatgagttaccaaaaaatgagaagttctacgtggctagaatattgagtttgtagtgggaaataacaagagatgtaaggagtttagaaaaatccgtgtataccagtgtctctcaatcttcttgaaggaaaaaaacacattataggcctctaggaatatgttcacaaatccctacagaattaagaaactgaagtttattctaagattctttcaaatcttcacttttaaagagttataaattcattcgtaatacattaaatgttagctgtcatcaccataaaaacccaatgtttaaaaaccataacattcttatcttcaaaagtatgtctgaaaaatttgccttgaaaacatgccattgacaagggtagttgtgataggttattaaacaaggaattgatattatcctacctatacttcaaaagatatgatgttagtggcattagtagaatgcagaaagataatcagtgagctattggggggagtcatggatgagagcttgatctaaagtagtgagaatgaggatgaagatgagttggttagtatacagaatcagaagctctcggtgactgactgtaaggcagcaaggaaagcaacaagttcaggatgattctgacacatctgtgattgatttctaacaattggtccttgtttttgtcctagtaagctatacgtcattttaaaaatgtaatttctcttcatataacagcacttataaagctgatattatgcttccttctctagaaccttaactttttttctgcagcccttcagctctttttgtttcaatgtcactatcaaacacttcactaggaactatttcaccacttcacatgcaaggactttttaaggagcaatctacagagtggtaaatgagctgtgggctttaatgagaaacaagggaagttttgaaatttttaatgacatttaaacaagaatagtgtgtgtatttgcagagaaaagccagctggaaaactacaatgaagcctccataggtaatctagttttcagtcttcctgcctgagaaatggacttccttagttcatgcaacaacaacaacaaaaaaaaaggtcacacagattcaaaaaataaattcatttgacactaattgtataaactagatagccaaggagatagttaacatggagtgacgcattctagtaattggaaggctaaactatttccctagtatcttcctcactaattctgagggaatcagaaactcagtagtttggtgtaccctgactccgagagaggcagaaggttttgaaagatgattgccagaccaggaaaacctttccgggcctgttttaattaatcccccagatttaccaccttgataaccacattggtattctgatcaggcaataatcctgataataacaataagaattcctatgtgccagacattaatactcctcacatgttatcttatttagtcctcacaacagtcctaggacatttcattgattaaactaaagcaccattctcagcaaagtaattattctaataaatttaggagacagtctctgtccttacattataagctcattccactcattttactcaaaaggtaacttttttctcatatatatatatatatttttatactttaagttctagggtacatgtgcacaacatgcaggtttgttacatatgtatacatgtgccatgttggtgtgtgctgcacccattaactcatcatttaccttaggtatatctcctaatgctatcccttccccttacccctaccccatgacaggccccggtgtgtaatgttccccaccctgtgtccaagcgttctcattgttcagttcccacctatgagtgagaacatgcggtgtttggttttttgtccttgtgatagtttgctgagaatgatggtttccagcttcatccatgtccctaaaaaggacatgaactcatccttttttatggctgcatggtattccatggtgtatatgtgccacattttcttaatccagtctatcattgttgtacatttgggttggttccaagtctttgctattgtgaatagtgccgcaataaacatatgtgtgcgtctttatagcagcacgatttataatcctttgggtatatacccagtaatgggatggctgagtcaaatggtatttctagttctagatccctgaggaatctagttgtactggcatatgcaatttattgttcatgccaaatatgaatattgacaaagtaaagtgaatttatgtaagccttgtgtcatcttcactctgaattaaaaggtgcaggtattatcttatggcaagtactgtcttaggaagattcactggaaagagagaaagagagaaacttcccagattagtgcagagtcctttagggtcaatgaaaacactgatattgaagacatatagaactggatttcagtatcagttctaaaattctgggcatctacttcctcatttataaaatttcttcaataattacatgctcaggttatcatgagaatttatgtacatctagctcctattacatacacaaaaaatgtttccctttttctcctgccaccttctctgtaatcttcaatagtcttctcaacttctcttataatttagcataggctgtcagtcttcatgatgtgtatttatccaagctaaagagcttttgtttaatttttcatgatttgaactcactgctgtggaaaatggctatttaaaagggataatgtcattttccaagaattcaattgagggtcctagaagatctttatggagcaaaataataatacaccttttctaagtatagagtcaggcattaagacatatagacatttcacttccttgggataagtcttgggaaaaatatcactacacattagcaatacatattgcaaataaaatttataactctattttatgcatttattaaacaaatacgagttaaaagacttcaggagttttggtctgtagcccaggctggaatgcaacggtgcaatcttggctcactgaaacctctgcctcccgggttcaaaggattctcaagccacagtctcccgagtatctgggactataggtgtgtgccaccatgcctcgctaatttttttgtatttttagtagagatgggatttctccatattggctgggctggtctcaaactcctgacctcaagagatccaccaccttagcctcccaaaatgctgggattacaggcttgagccaccacacctggcctaacttcaaggtatcaaagacaaattaacaatgtctgatgcatacataggactgctttgtaatcttctacactaatgatttgtactattttggtttcagaatccatttataactcttacaatatatgaaaaatttctgccagcttttatttatgtgggttatatttatgactacttctcatttgtaaaactgaaataaaaagatcttgcatatttgtattaatttatttaaaaaattaatttgttatgtgatagtataaataatataattttaatatttcaaaaatactaagtggaatgagattactttatattttttaaaaacacactacatctgactacttctacattcaatatattataatttattgtttggttgaagaacttgatgaaaatctagcctcacacaactatgtaatcagaatagagagaagtatttttaaaaacattttcagataattgtagatcctttctttttgatactaaaacttcacaaatggtaatttcctcagagtttaattacactgtcaaatctgaaatcatatcaatgaactttttgtccttgctacattaaagtccattgatctgtctagcatcatgaatgagtattttacccattagtgattttataatagcatgcattggtcatttgtaaaatactcagttaagtgatcttccaaatgttaaaatatctcattatacaatattcaaaatcacattattaatatcaccaccaatctcatcagaaatatctttaagtatgaagacattgacaagctcataatgatgttatcaatttttcttaatttaaatttttgcttgaaaactcaaattgtagcattggcaaaaaagaaaaaaaataccattagctttttttttctgtttaagtgacagacttgctttgttcacataagaagtctgccaaatgcctgtctaaatagccagtttatctctgaatcctacattcaagtgaaaatgatttcctgtgggaaacatgattatttcagctctcaacacaaataatggcacaaatgttttttccctagacgaacatatttcagaatgcagcataaatagtgcatatgtaggttccattttgtgaaacagaaaattaaaaaggcatgtaaaaaaagatagtttaaaaaattgttttgcttcattatggacattaagtgaaacttgcatttattcatttttactgcaagtctgtggctggtgaagaatataataattacagtacacttggttgccactaccttgatttgtgctaagacaccagaagatttgcccaccattgcttttgcaccatcagtgcaaatgtgaacacagaaaaaggcaaaatcacatcatagtatcattaggaaaatagttttgacattgcaaatcctctgaaagagtttcagggacttcaaggggtctgttggccccattttgttaagcaataaaatattgggattgtagaataatttcttttttaaaaataagggcatctgggaagaccttattaatttcaaatacaattctgcattttcaggatgaaatgtcaaagaatgttgatatctaaaggcacatttgcgaaatccaaaaagacatggtggctaacaacgtacattatcaggcctttcctctagagattttggttcagtaggtctggcagtggaagtgggggtgtttatgacctccagtgagccacagtgacttatataataatgttatatatatatgtgtgtgtgtggagatatagatatatcacataattatttgtatttatatattaaaccttattatcaatacaaagagcacacacccacacacttatttttgtgggggcagggtaaaaggtgttttcctgcaatggtacattagtcaccttgcttctctctctggtggctgttgaggttgtctacagtggattgggtgcatcctgagggccctcaacagaatgaggtccacacacaaccttctagtatttggaaagttgagggacagcatgaaaattgcacagtaaaagcacacactgttgagctatgaaaatgaagcagttttttttttatagtaaatagtaggtcattgtgtttcccaaacgtgatctaattggctattacaaattatctggcacatatattgattccagatgtgattagtgttcacttggttttagggttttacatatacgccaatttggcagtcctaacgtgttgatgttgataatgtttcatggccaaaactagaatatattttcataatacacacacacacacacacacacacacactgtatagctggatcctaggaaactttaattttagtaaatgcctcagatgatttttatgatcaggcatacagggcagctctgctctatagctggttactatattcacatttcttttcttaagatgtaataattaatggagggggagcagattttataatcaactgtagaaatatggttataaaaactcgttatttcatggcttatacttctcttcattgcaagctcctcttacctcaaggacagaaaaaaatgatgctgtttctatgaaaagatttttctgtttagtaaaatctctagtgtaaaaggagtggcctgttttcaatttgcaagtctgatcattagcctttgattcatataacataaatagacttctttgatatctaaaaagcttggctatattaaagtaagaaagtaatagatacttgcatttccacattacaagtgagcaacagagaaaacaaaattagtacttgttgagcacctgataccttgtacattttcaaataaatcacttgaaatttgcaattacaccatgagacaggttttcccttgattttacggatagggaacctgatagtcacatggttgataacaaccatagttaagtctactattccaaattcatctgactccaaggctgatacaaattccacttcactacaaagccttcttcagcctgctaaagtaaagctggggactctgataaactcccaaccctgcctctggtatatgacccaacactaaccactctgctcagagtaggtatctaaaagaaattcttgtgtgaaacaatgaaattttggtgggaaaacagaaacatgattgtcaataacaaaagtatacaacacagacttctacttctgggaaggtaaagtaggtacacttttctctattagtccctctaaatacaaccacaatctctggacatggcatataaaagaaacagaaagaatgtaaatagtgaagagaagaagccaggtcagctaggaatattgggatctcacggtatgatggtgagtcccctgggttttattttcctcatatattcaagatttggagctgaagaagcttgtaacctagaaacacccagaggtacaaacaaaagtaaaacaaaacaaaacagaaagaaaaaaacaccaacaaaagccttctctctctagtcaaatgacaaagaaaggtgcagaaaagttttaaacagtaactactctatttcattcaaattcaaaaacagaaaaactgaggcacaatccccacccaagtcagcaaaagttgactggggagactagacttctacccttactaggctataacaaggtgcctcctcaattcccttccagggtgatgtaagagaaggctcagtttgcattccaaccagggaggaattaaccactcttcctactttacatggaggcaatgtggaggacctgcaattctatccccaccaggcagtaaaaagaggaatcctttcttcccttctggattgttgtcagaggaggcctactggatagttaggtcttctagcactgtctagtggtaattaggccacccaatccatggcattaggggaaagtagttgaggagcagtaatgaggggtattcttacctctcctagcaaggaagacatcagtagaggcctagtggggagccaggtcggtggggaacttggacttctattgctacttaaaagtaataatgcagtgtttcccttctgctggagctgagtcagagaaagccaggagattatacatttttttttttttgagatggagtctttgctgtgttgtccaggctggtgtaaagtagcgtgatctcagcccactgcaacctccacctcccagagtagctgggattcccctgcctcagtttcccgagtagctcagattgcaggtgcccaccaacaagcccggctaattttttttatatttttagtagagacaggatttcactatgttggtctggctagctcccaactcctagcttcaagtgatccacccactttggcctcccaaagtactgggattacaggtgtgagccactgcgcccagctgagattataaacttttataaaacagaagatttaataagatctgtagtctcataaaatacccaaaatgtccaggttgaaaacagaaaataatcccttatcatactaagaaaagttacatccttgaattaaaaaaaaaaaaaagacagcagacgttaacactgaagtaacagatatgttaaaattatctcaaataataggttgaagcaaaagtaattgtggtttttgccattgaacagaatggtgaaaaccgcaattacgtttgtaccaagttaatagatttaaaacactcatttttgaattcctcaatgaataattataaacatagttgaaacaaatgaaaaaaatagaatgacttcgcaagaaaatggaagatatcacaaagaacaaaacaaaattagaactaaaaaatacagttaccaaagtaaaagtctcaatactaggttcaacagcagaatggagaggaaagaagaaagaataagtgaactggaagatagaaaaatagaaattaccaaatctgaaaaacagaaaacacactggaaaaaaaattaaaaaggctcaaagagttgaataactacatgaaaatgattgaacttttgtgttattagtgtcctagaaagaggggagaaaaatcagttctaagaactcaatgaaatagtgactgaaaacttcccaaatttagcaaaagaaactacaaattaaagaatcagagttaaacccaatttaataaatcccatagcaatccacatcaaaatatatcactattaaacttctaaaaactaaaacaaatattcaaagtagtgagaaattaattatatcttatctattgtggaaaaaaatgaatgacagatctttcctttgacactatggaggccagaaggtggcactgcatttttcaaatgctgaaaaaaatgaactgttaacccagtgttctatgcccagggaaaatactcaggaatgaaggagaactcaaggtctcctcagatgaagtaaaatgaaaagattttgtcaccaccaagcagacctgccctgaaaaaaaaatggttaatagaagtttcttaagaagaagggaaatgataaaataaactttcttaagcaaaaatatagggaattcaacagacttctgttgagttttctaaattgtgatttaatggttgaaacaaaaataaaattttatgtcattcatctaaatgaacataagataaatatttaagacaaataaggttttacacttaatttgaactagttgaaggatgatgccagcagagataaattatgtaaaaataatgtaatacttagataaatcaccaataaagtgatacaaagaaatacattcaaaaaacttgataaataaaaatggaatttgtaaacattttcaagcaactcaaatgaagacaggaaaaatgaaccaaaaaattcagaaaagtaacaaacaggaaaaaaataggtttaagccataacattatataatacttatattaaatgtgaatagtctaaaaataccaattaagagattgggagactagattttatttaaaaatgacctatattgagcctagaggaaattcactttagatataacaatatttgtgaaagttaaaggatggaaaaaatcataaaacattaatcaaaacaaagttaaagtggctatattaatatctaataaaatagacttcagagcaaaaacaattattggagtaagagaggcacattttatcaagattaatgagtcaatccagtaagaagacatcacaatcctaaatgtgtatgcaccaaacaagcttaaaatttgtgaagcaaaagctggtagagctaaaaggaagaaatagacaaattcacaattacagttggagaattcaatactgctgtttaaccaacaggactaggcaaaacatctgcagtgataaagaacttaacaccatcagccagaagaatctaatcaacattgatagaacattccattcaataacaacaacaaaaaatatttatttgaagtgctgataaaacatatgctaaacatatgactgccccttgagccataaagcaaatatcaacaaatttaaaaagattggaattatacagactgtgttctcctaccccaatggaatcaaactagaaatcaataacatgagggaaagatcttcaaacacttagaaactaaacaaagcacttctaaataacccaaggagtaaagagaaagacttaaggaaaataaaatacatttaaataaataaaattaaaaaccaaacttaccaaaatttgtcagacatactataaaattgtgctgagagggggaagtatagtactaaatgcacacatgtggaaagaggtaaagtctcaagtcagtaatacaaactcaaactccagaacctagaaatagaagagcaaaataaaaccaaagcacagagaatgaaggaaataataaagataggagcagaaagcagtgaaattaaaaacaggaatcaatacaggatatgaatataacaagcagctggtttttgggaaatattaataaaattgacgaattagcaagattgaaaagggaaaaagagaaaagacacaaattaccaatatcaagaatcaaaaaagggatatcaatacagatcttgcagacatcaaaagggtaataaaagcgtactatgagcactctatgtacataacatttgacaacttagatgaaatgaactaattcctaaaaaagcgcaaactataccactcacccaataagaaatagacaacttgaatagccctataaatgtaaaggaaattgaattggtaattttaaaactaccaaaatagaaatcctaaggaatagaatgttttccttgagaatcaaccaggaatttaacaaattaacataaattctatacaatctgttccagaatgtagaagggaacatttctgagtcattttataaatccagtattaccttaatattgaaaccagataaaaggatgccaagaaaatgagacagatcaatatccctcatgtacatatatgtaaaaattcttaaaatattgacgaatataattcagctgcatataaaaagaattttatgcattgaaacaaatgaaatttattccaaaaataccaaactgcttcaatatgtaaatattctgtatcttgaccctttcaataccaatatcctagctgtgatattctactatattacataatattttttcaaggttaccattgagggaaattgaataaggagcacatcagatttctctctattatttcttacagctgcatataattctataattaactcaaaataaaaagtttttaaggccaggggcggtggctcacgcctgtaatcccagcactttgggaggccaaggcggggggatcacgaagtcaggagatcaagaccatcctggctaacacagtgaaatcccgtctctactaaaaatacaaaaaaaattagccagatgtggtggcgggcacctgtagtactagctactcgggaggctgaggcaggagaatggtgtgaatccaggaggcggagcctgcagtgagtggagatcgcgccatggcactccagcctgggcaacagagcaagactccgtctcaagaaaagaaaaaaagtttttaaaaagacaaagttctttaaggcaaatatttgaaatttacatttaaatagatagatgagataaaagacgtattaggaaccctatttcagtcaagcaaggagcaatacttacttttatttattgacctttcttgatgcataaacatcaagagaaccaatgtgtaacatcatccaagataatatcaacagttatcaatatatgtgagaaaagacttagggaggacttccaatatatattttattctaaattttacattatacaaacagctattatcactttgttttctgccaatttgagatgaataattattgtgccagagaataaaataattgctcagtgagtatgcaattcatctgaatctatggatcatttacagagaatctccttaaaatatgcatcataattttaatcactaacatatacccaaatccctaattttgtaagtacttctaaaacatatctaatgatctttgtaatcattcttcttagacgtatttactttgtttttatttatccaccagcattagcaattgcttatttttgttgcttactttataaagaaagattttccatatcaatcaatttttatggccactatttatgttattgtaaagtaagaacaaaggtaagaccttttgctcaactttcagttgagtttaaatccttgctttgggagagcttccaagatgactgaacaggaagagctctggtctacatctcccagggagatcaatgcagaagatgggtgatttctgcatttccaactgaggtatctgattcatctcattgggactggtcggacagtgggtgcagcccacagaaggtgaaccaaagcaggatggggggtcacctcatctgggaagcacaaggggttgggggatttccctttcctagcccaaggaagctgtgagtgactgtacctggaggaacagtacactcttgcccaaatactatgtttttcccatgctctttgcaaccagcagaccaggagattccctcccatgcctggctcagcaggtcctgtgcccacagagccttgttcactgctagtgcagcagtctgagatagacctggcatgctggagcttggcagggagaggggcatccaccattgctgaggcttgagtaggcgattctatgctcacagtgtaaacaaagcagcagggaaactagaactgggtggagcccactgcagctcagcaaggcctactgcctctttagattccacctctgggggcagggcatatctgaacaaaaggcatcagacagcttatgcagaattaaacgtccttgtctgacagctctgaagagagcagtggctcttggagcacagcgttcgagctccgataatggacagacggcctcctcaagtgggtccctgaccccgtgtagcctgactgggagacactacccagtagaggccgacagctgcctcatacaggcaggtgcccctctgggacgaagcttccagaggaaggatcgggcagcaatatttgctgttctgcaggctccattggtgatacccaggcaaacagggtctggagcggacctcaagcaaactccaacagacctgcagctcaggggcctgtctgttacaaggaaaactaactaacagaaaggaataccatcaacatcaaacaaacaggacatccaaagcaaaaccccatttttaggtcacatacatcaaagaccaaaggtagataaaaccacaaagatggggagaaaccagagtagaaagactgaaaattccaaaaaccagaatgcctcttctcctccaaaggaacacagctcctcatcagcaaggcaacaaaactggatggagaatgagtttgacaagttgactgaagtaggcttcagaaggtgggtaataacaaacatctccgagctaaaaggggatgtttaaacccatcgcaagaaagctaaaaactttgaaaaaaggttagatgaatggctaactagaataaccagtgtagagaagagcttaaatgacctgctggagctgaaaaccacagtacgagaacttcatgaaacatatgcaagcttcaatagcagattcaatcaagaggaagaaaggattgaagatcaaattaatgaaataaagtaagaaataaagtaagaagacaagattagagaaaaaagaatgaaaagaaacaaagcctccaataaatatgggactatttgaaaagaccaaacctacatttgattcgtgtacctgaaagtgatgacgagaatgaccaagttacaaaacactcttcaggatattatccaggagaacttccccaacctagcaaggcaggccaacattcaaattcaggaaatacagagaacaccataaagatactcctcgagaagagcaaccccaagacacataattgtcagattcaccaaggttgaaatgaaggaaaaagtgttaaaggcagccagagagaaaggttgggttacccacaaagggaagcccatcagactaacagcagatctctcagcagaaaccctataagccataggagagtgggggtcaatattcaacattcttaaataattttcaacccagaatttcatattcagctacactaagattcctaagtgaaggagaaataaaatcctttacagacaagcaaatgctgagagattttgtcaccatcaggcctgccttacaagaactcctgaaggaagcactaaacatgaaaaggaacaacgggtaccagacactgcaaaaacacaccaaattgtaaagaccatcaatgctatgaagaaactgcatcaattaatgggcaaaataaccagttagcatcataatggcaggatcaaattcacatataacaatattaaccttaaatgtaaatggagtaaatgccccaattaaaagacacagactggcaaattggatagtcaagacccatcgatgtgctatattcaggagacccatctcacgtgcaaagacacacataggctcaaaataaagggactgaagaagatctaccaagcaaatggaaaacaaaacaaaagaaaaaagcaggggttgcaatcctggtctttaaactaacaaaaatcaaaagaaaaaaagaaggccattacataatggtaatgggatcaattcaacaagaagagctaactgtcctaaatatacgtgcacccaatataggagcacctagattcataaagcaagttcttagagacctacaaagagagttagactcccatacaataatagtgggagactttaacaccccactgtcaatattagacagatcaatgagacagaaaattagcaaggttatccgggaattgaactcggctctggaccaaatggacctaatagacatctacagaactctccaccccaaatcaacagaatatacgttcttctcggcaccacatcacactgtaaaattgaccacataattggaagtaaaacactccacagcaaatgtaaaagaacagaatcacaacaaactgtctctcagaccacagtgcaatcaagttagaactcaggattaagaaattcactcaaaaccacacaactacatggaaactgaacaacctgctcctaaatgactgctgggtaaataacaaaatgaaggcagaaataaagttgttctttaaaaccaattataacaaagacacgacgtaccagaatctctgggacacatttaaagcagcgtgtcgggagaaatttatagcactaaatgcccacaagagaaagcaggaaatatctaaaattgacaccctgacatcacaagtaaaagaagtagagaagcaagagcaaacacatttaaaagctagcagaagaaataactaagatcagagcagaaatgaaggagacagagacaagaaaatcccttcaaaaaaatcaatgaatccacgagctgtttttttgaaaagatcaacaaaatagatagaacattagcaagactaataaaagagagaagaatcaaatatatgcaataagaaatgataaagaggatattgccactgatcccccagaaatacaaactaccatcagagaatactataaacacctctatgcaaataatctagaaaatctagaagaaatggataaattcctcaacacatacaccctcccaagactaaaccaggaagaagttgaatctctgaatagaccaataacaggtgctgaaattgaggcaataattaatagcctaccaactaaaaaaagtccaggatcagatggattcacagccgaattccaccagaggtacaaagaggagctggtaccattccttctgaaaatattccaatcaatagaaaaacagggaatccttcttaattcattttatgaggccagcatcatcctcataccaaagcctggcagagatacaaccgaaaaaggagaattttaggccaatatccctgatgaacatcgatgcgaaaatcctcaataaaatactggcaaactgagtccaacagcacatcaaaaagcttatccaccacaatcaagttggcttcatccccgggatgcaaggctggttcaacatacacaaatcaataaatgtaaatccatcacataaacagaaccaaccacaaaaaccacttgattatctccatagatgcagaaaaggccttcaacaaaattcaacagcttttcatgctaaaaactctcagtaaactaggtattgatggaacgtatctcaaaataataagaggtatttatgacaaacccgcagccaatattatactgaatgggcaaaaactggaagcattccctttgaaatccagcacaagacaaggatgccctctctcaccactcctattcacatagtattggaagttctggccaggacaatcaggcaagagaaagaaaaaaaggatattgaaataggaagggaggaagtccaattgtctatttgcagatgatatgattgtatatttagaaaaccccattgtctcagcccaaaatctccttaagctgataagcaacttcagaaaagtctcaggatacaaaatcaatgtgcaaaaatcacaagcattcctatataccaataatagacaaaaagagagccaaatcatgagtgaactcccattcataattactataaagagaataaaatacctaggaatccaacttacaagggatgttaaggacctcttcaaagaggactacaaaccatggttcaaggaaataaaagaggacacaaacaaatggaagaagattcaatgctcatggataggaagaatcaatattgtgaaaatggtcatactgcccaaaataatttacagatccaatgctatccccatcaggctactactgactttcttcacagaattggaaaaaactactttaaagatcatatggaaccaaaaagagcctgcatatccaagacaattaattctaagcaaaaaagatcaaagctggaggcatcatgctacctgacttcaagctatactacaaggctacactaaccaaaacagcatgacactggtaccaaaacagatatatagactaatggaacagaacagaggcctcagaaataacaccacacatctacaaacaacagatctttcacaaacctgacaaaaacaagtaatggagaaaggattccctatttaataaatggtgttgggaaaactggctagccatatgtagaaatctgaaactggatcccttccttacaccttacacaaaaattaactcaatatggattaaagacttaaatgttagacctaaaaccataaaaaccctggaagaaaacctaggcaataccgttgagaacacaggcaaagacttcatgactaaaacaccaaaagcaatggcaacaaaagccaaaattgacaaatgagatccaattaaactatagatggttctgccagcaaaagaaatatcagagtgaacaggcaacctacagaactggagaaaatttttgccatccatcaaactgacaaagggctaatgtccatcaaaaagtggacaaaggatatgaacagacacttctcaaaataagacatttatgcagcaaatagacatatgaaaaaatcctcatcatccctggtcatcagagaaatgcaaatcaaaaccacaatgccataccatctcatgcctgttagaatggcgatcattaaaaggtcaggaaacaacagatgctagagaggatgtagagaaataggaacccttttacactgctggtgggagtgtaaattagttcaaccattgtggaagagagtgtgacgattcctcaaggatctagaactagaaataccatttcacccagcgatcccattactgggtatacccaaaggattatatatcatgctattgtaaagacacatgcacgtgtatgtttattgcggaactatttacaatagcaaagacttggaaccaacccaaatgtccatcaataatggacaggataaagcaaatatggcacatatacaccatggaatactatgcagccataaaaaatggatgaactcacaggtcagacccactgaaatagcaccaaatatcagagccaagggatgaacagagctctaaagtaaatcaaaagcccagaaatcaggagactaagaggcagtaaatcatgtgattaagaacatagattttagcatcaaacatgcctcattttgaatcccaaagctgctacatctagctacataatctttggcaagctgcttattcttccctaagccttctttttctcaccataaaatggtgctaatatttgtagccatctaaagttacagctttgatttttagtacgatattgtaaaaatatatatgtaacaacgttcttagcacacaattactagatagacaaggaacttgctattaaaatatttgcattctagtgaggagaagcataagcaaaccagaaaagaaataagcacaaaattcagttaagcactatgatgtgatataatatctatatattttataaagaattacttgggagaagcttgcagttgagataggctacttatagctgacttctctgatgaagctgaaaaccatcattctcagcaaaatatcacaaggacacaaaaccaatcaccgtatgttctcactcataagtgggagttaaacaatgagaacacatggacacaggatggggaacatccctgtttgggggtggggggctgggggagggatagtgttaggagaaatatctaatttaaataacgagctgatgggtgcagcacaccaacacggcacatgtacacctatgtaacaaacctgctcattgtgtacatctaccctagaacttaaagtataataatagtaataaaataaaataaaaattattgctttggcaaagaataaatggctatatcccattggctttaaaaatttgagtctaagcaatccattaaaataatctattttaacttaaaattttttatagatttaggggtacaatcatgattgtgttgcacagatatattgcacagtggtgaagtctgggctttgagtgcacctgtcaatcaaatagtgttcatagtgttactaagaaatgtttagaaatgtcataagaatcccaccatttttggagagagatcattaatactaaagacgcaagaccctccataagtcatttaacttcatacagctcatgttttttatttataaggtgaagataatatttctgttctatctgtttatgtaattatcaactaagataatgtttgttaaacatagaaaacctctgttactatattattataatgaagaaaataatttttaggatttatacaacatactaggattttggtatctttaatcaataattttaattgaaaccatatttatttttctttttcatcctgcagtaaattcagattttgtgcagtgagtgacttcacttaccaatagaaggtgtgaaagcttatgaacctggtgaaagcttatgaacctggaattgtgactttagtgtataaataaacagaagaaaatgcagtaagaaaaagcatcagatttataggtgaaatacttaaaggatggcacttaaacagagtaagaaatatgacttgtatgtatactaaaagcaactgtggctcagattattccttctgaggttctatctgccattcatttcatggaatattgtggaattagcctatttcaccttctattaaatgaggcccactttatggtatcataagaaaactcaaggctgaggtgcactgattgcctcagctctggagtttgacacgagcccaggcaacatggtgaaaccccatctctactaaaaatacaaaaaattagccaggcatggtgatgcacccctgtagtctcagctactcagtaggctgaggctggagaatcgcttgaacccaggaggcagaggtcgcagtgagccgagatcgcaccactgcactccagcctggatggagtttttccatctcaaaaaaaaaaaaaaaaaaaaaataggtaaacccaaataatatgccttttaagaaaaagaagttgattttgctcttatgaaacaatatgaagttagatcttcaagatctggtagtgcaattctgtcatccttaactcacagcttccatctcttgatcttcatcctgttttcaccctaatcgaaagggtgaaagtgggaagaatagcgtatgactatttttctttaaaggaattatttagaagtgtttcttatcatgatcaaacagacatggtaacatttagcttaaactggaagatgttatctccagctagtggccatgtgtccaacaacatttagattattattaggaaaaagagaaaaaattagcatttgtgaaaaaagtagtagtctctgtcacaatcttttacccatgttttgtaaagtatttaaaacaaaaatcaagcactcttaccataatgttctgtcacagtgttgttttaaatttcatgtaaaacaacattagttctgtagtggtaaatgaagtgttaaagtctctctttaactccagacctttcaagttattaaaaatgcgaacatttattatctaacttaggaagtagagaatattggagtaagtaatactatgcagtgttaacaaacgtatgccaaaatcttagtgatgtaatccaataaaaatgaatttcttgctcatccaaaatccaatttggatgtttctggttggggaatgaccttccctatggctatgttagtgagtctactgtcccccacttatctgatgtatcttctccatcttcctgggagactgagtatgaggatgcatggagaattgtacatgagaaatatatgggccaagccttgaagtggcccacataccttctgcctacatgtcattgaccactacttattcacagggccacatataaatgtgaggttcattgtgcatccaggagttaagggaaagtggttttttgaacacagtgaatggatgtgtcttgggtgtttctgtttgagtctcttcgttgttttatttttccctctaggatccagtaattcctgaactttagttctggcctgggctggcctgcctcattttcactgaagcctcgattcttaactgtgaaagaatagataattttctctttcttaccattgcttgctgccctactctttctgaaatagtttcccatgttatcccattttctactacatggaaaaagatcatgctattctgttttccataatcattatatattcttttttccccatggtatttcccaaaaatttattattccatgttttatgggtgaatagttatttctattaactacttttttagagtgaagaatcatcgacctcttctatcctaacatctactgttatcccctccatgctgaacaacaccaaaactatttttcatgtaggttgttcagggctttctctctattcacttaattattccatcaggagactattgagagaggcctataacataaaaacataagggttaaattcaaagccatcgtcaatcttactcaaagacataaaccttagaacattataggaatcttcaaaaaagttagcttaattgattttaaaattatgccagcaactaaagctacatgttttagaaagagaaatatatgcctcatgtttattgattaaaaaacatttatagatactttgcaatatactaggaataaatgacatattctgccctcttgaaacttaatataattaagaactagattgtgaaaaactaattataatccaaagaaaataaatgattaaaagaggcaaatttaagtgtcattaaatgaaggaagctaaccaaatatttcttgtcaaagaaatttttatggatgatctgatatcaccaagaatgagctggaatagtttcagtaaagtacaaagaagaaaaggaggaaaattgacaaattctttcctacatctttacaaaataaccttacaaattaccagatagcctctgtaattaataacaacagttaacatcactacaatcctacttttctaaaaacttttcacgtccattatcttaattattcttcttaaatgccttataccatatttattattatgcacactttataaatgaggaaactgagattctgataatttatccaattgacaatgttacagagctaacaggtagaaaacatggatcattagcaagggagatcatgtcctcaagtgttccaaatagaaaagccaagttttagatgcagctagagaaaagcagttaagagttggactacctgggtttaaattctagtactatcacttactagttaaatgacttttgtaaatttaacctgcccttgcctgaggtccctcacttacaaagtgataataatcacaatacctacctcatatgctattgtgaagattacataagtcagtatttgtaaattacttagaaccatccttttattgcaataatgaaagttccttaaagttactgtcttgcatgctgatgcacacactgtaattttctagccctatatagaagccaaattccaaacaatagactaggacttgagactcaaactggacaaaaattgtttcaggaaaatattagtcctaaattaaacttatatccaaagtgtaaagagcagcagaatgacagagtgactttttttttttttttttggagacagagtcccactctattgcccaggctggagtgcagtggagcgatcttggctctctgcaacctgtgtctcccaggttcaaacgattctcctgcctcagcctctcgagtagctgggactacagacatgcaccatcacccctggctaatttttgtatttttagtagagacaccatgttggccaggctggttttgaacccctaatgtcaagtgatccacctgtctcggcctcccaaagtgctaggagtacaggcgtgacccactgtgcccggcctgatagaatgcttttaaaagcaacctttaggatgaaattatgtccttccacaaattcttacaatctagtaaaaaaattaaatttgataagaacaaaaattggccataagtatgtgggtattgggtcttatacaatatcttggtgacactaccaaaaattcttgccttctctgatccagttgactatgtgccctggagtcctgtgataggaagctgatgaagttttcatccagagagtaagaaccagcatgatagggccttttctaccccaagagagtactctgtgaaaaagctgggttgcagctttttattccaatggatatgacaagaattaaaggaaataaaggaactatcataactgcaacagaacatctattgtctattttaaattttattgcaactaatggctttatatcaactgaaagaatgtaacagaataattaagagcaaagcttggaagtttggcagataattggccaaaattctgaccctgccacttatctgcttgtggtaggccgttctcacattgctttaaagaaatctcagactaggtaattaaaaaaaaaatggttttatttactcacagttctgtaggccgtacaggaagcacagtgctgacatctgcctggcttctggggaggctgaaacttacaattatggtagaaggcagagagcacgcacattatatcgccagagcaggagccagcgtgaagggtagcaggtgccacacacttttaaatcatcagatcttgcgagaactcactcactattgtgagaacagcaccaaacggatggtactaaactattcatgagaaatttgccccatgatcaaatcaccttccaccaggtcccacctccaaaagtggggattacatttcaacatgacatttgggctaggacacatatccaaactatatcattactgaatgaccttagataaaccacctatcctctttgagacttagtttcaacacctgaaagttggttaaataatatcttctttacagagttactacgaagatagccgggcgtggcgggtgcctgtaatcccagctactcagaacgctgaggcagaaaaatcgcttgaacctgggaggcggaggttgcagtgagcggagatcacaccactgcactccagcgcctgggcaacaagagcgaaactccgtctcaaaaaaacaaaactcaaaacaaaacaaaacaaaacaaaaacagagttgctatgaagatgaagttctataaaaacttaaggaaatgcagcctagcacctaccacataggaatagaaggtgtagtaatagcagtaatctttgttgtagagaggcaattaagtagtagagaagagaaaacacaaacaccgaggttaacaagtagagaagcccacttaaaataataaacactttaataacacaaaaacctttcttgaatttatggaaatgacttataattcattgtgatttgtcattgtctttgtgcaaacaatgaaaagaatgagagcagctgttttcaaaccttatttgcattagaatcacctgtagaactggttaacacacacgatgggtccccacctgactttctgttcagtgactcactgttagggttagaggatttgtgtttgtaacaagtttacaggtgatgctgctaactctgggaccacatttttgaaaaacacaaaatatgtggagtgtttgtgccctgggctctgctgtaataattacatagtatgaaacactcatgcaccacttcatttgcttcgttactctattcctcataatcaaagaaatctcctgagtcaaattaaaagtattttctaataaacataaatgctaattaattacatttatggctgtagagctagcactttgagcaaactggaagttggttgaaagttaatgcttctcgtgtatctagggacttgcttagatccaaaaatgttttttgatctgcaattctgtatttcttctgtaagtagtttaaattacaagccttttcaaagtattcagccatcaaatacagcctcctaaaaccattgtgcataaccttttgaagctgtgtacttaattcctcaatcaagttgcacattaggagagtaaattggaggaatataagtcagtgggtcttaagtcactttttaaaaaatcttcagatgcactaatgtacattttctatcttctttttatttcctcttctccaattccatctctgaaacactatgaaatgttaaaataggttaaaaatgcacttaaatgaaatgcaataaattaaatgtgctctattcttctgaagatttaactacacaccttttcatatttcagactcttagcaggtatgattaaagtgcaacatctgtaactcatcttcctcaaaggaaagatacggaattatatgagatgatttatgtgccaatgcctagccagtgactgttacatagtagttgctcaatttcttaaatcataattttcaaaggaacatggaacagttaccaggaagaaaatatgtcaaggcataagtttatagtgtaagattttaaaggcagaaggatttttggactgtcagaatatagaaggtgaaaatttcatatcaaggaaatcatatattcacaggtagtttttgaagcatgagctcaggtttagagaatggagatcagtccagcttaattcagtgcagtgcaaccctggtcacatgttagaacgacccggagtggttttcaaactccaagtgcctgagtcccattctaaaccagttatatctgaatctctaggtatgagagctaagcatcaatattaaaaagaaacaaacataaacttttcagagtagtattagggaagaaaagagcaaaagagatcaactagttgcaattttctattgttgggtgccgggcacggtgtctcacgcctgtaatcccagcactttgggaggccagggcaggtggatcacctgaggtcagtagtttgagattagtgtggccaacatggggaatccccacctctacgaaaaatacaaaaattagccaggcatgctggcttgtgcctgtaatcccagctactctggagtctgaggcaggagaatcacttgaacccaggaggtggaggttgcagaaagctgagatcacaccactgcactccagcctgggcaacagagtgagactccatcttaaaaaaaaaaaattctattgttgccattgacctgaaactgggtttattaatttcctataggaatgtagcttgcaaatgttaaggcataacataatttgggggaactcttactgcctttcacaaagaacattgagctattttggcatctgtgactaacatgtctctactggctcagtaaaatttctttccatgaggaattcgtggacaaggttgagataataacacattctgcaccttgctgtaatttggtagctaaaaatgacaagtccacaaattcattgcaggggtatagtgcaaagaaatttccaagggtaagtcagtacagacactacccaactgtatatgcaaaaaggagcacaggaattggaatcaattattcagttcattgattccccaactactagctttaatgtatgtgttatttaacttctataagctgtagttttcacatttgtaaaactgaggtaatgataatattcatatcacaagtagccctgagattcaaatgagattatttacatgaaagatatttgaaaagctggatatatatgggcactattttggggtacttagaatttcctctttgacttattcttccaaaacagagtcaaatctcagccagagaagctaccgatgttggagtaattatttctattttttttcaagttgacttcaccaaccaagaaaataaactctatgaaaagataaaatagaaaatagtttgttcacatttttatattatttgtcattcataacattttctctgttttgtcacttgacaggtgccagagtagagctctctaaaattccctcgtaggttttttggaaattgtctctcttattcccaatctctgtaggatatataagtgaaagattgagagtattttatatttgtttatcttttaaatatgaaggtgttcaagtctctgattttgattatcggaaatcaaaacaaacaatttgatctctaattctgaggtgtctctagtctatttgaagagacaatatatacattatttaaaattgttactataataaaactgtttacaactgtttatattaatctggtatgtattacaaagaatcttggttcaacctgggcctttacattatttctaagcacatatcacaatgtattccgacaaattccttgtgctttttctttagctgtttttttttttttcttaataatattaggggcttttctagatgcaacatctgtcaggtcagtatagtagtgagtaatgaaataccagcctggctgaaaacgctcttaaaatgtcggtccattctacttcctaagacacctaagaacacctgatataggatgagagcaggcagcaggcaggtttctacagaacaatgaagtttaggaaggagggagatgcgtgatgctagggtggtacctaatggttgcagcaaaagagatacttttgcattgagagtgcaccatattcttggttagcagcaactatttaccacatgcaacatgattatagaaatactagttactactcaggaagtattcactttgcaccagatctgtactaggtgcttttatacctgctatcaaaattaatccttgccaccaactgataagtggacattatttacttcctctcttatcattgaagcccaaaaaatataaataacttgacaaggattatacttccagtatgtaacacagaatttaagccaagttctactcagttcaaaaatcttttttacagcagtatcttcaaagtggcatagatacactactgcaggttcacaaaaactttctaaggggtacatggtgcagagagttttaagaaaatttatttttagctcatccttccaagcatacttttccaaatgaatctgattgagaagactcctgaagattctccttcaccaactctcctttcaaaatctcccttctctgatgtttcagaagagcctatcttccacctatcctgaattcattctcaatacagtctgctcccagaatgggaaaaacttccagagtgtttaacaagtggggaatccgaaacattggtgctagtgttgccaacatgtataactttaattactaggcaacaaacttcttacaagttgggtagtttataaataaattcatcatttgtgaaattgcttttatcaaataattcttgcttgagttgtcagttgatggatcaaattgtaaaaactatttttttttttgctggattgtatcattattagcatatttagctcaaatgagttcaaaaagataagtaaaatttaaataaaaatttctttacccttatctagttatttatgggaacaaagcttcttggcagttatttatttttttaaaatttagaatataattgatatacctatttttgttacagagaattttggtaggctacttattcttttccctttttaaaatttataaataaaaattgtatatatttatggtgcatcacatgatgctttgatgtatgtatacattgggaaatggctaaatcaagctacttaaaatatctgttacctcacatacttatttgagtagtaagaacatttaaaatctactctcttagcaattttcaagtataccatacattattattaactataatcaccatgttgtatcatagatctcctgaacttattcctcctatctaacaaaaaatttgtatccttagacatagatctcctgaacttattcctcctatctaacaaaaaatttgtatccttagactaacatctccttaatcctcactaatatttttcaaatattttaagcataacatatataacatttagatataattgtgtagaaaaatagtatacaaatacaagttcaagtataaaaaggtaactccagaaagttacagactatcaaagaagagtttaagttgtttttgatatggatgatggaatcaaataattatggtggatacattttttgaaagtaatattatatgttcatttttaaattgacactatttgcaatatccttttattatatcctctgaaactatttatgattatgattaaaacaatttgatagtacagtaggaaaattatagttaacaacaatttattctattgtatatttttaaatagctagaatagaagatttgtaagattcccaacacaaagaaaagataaatgatcgaggtgattgatattccaattactctgatttgatcattacaccttgtacattataggcatcaaaatatcacatgtaccccaaagatatgtacaattgttacataccaatgaaaaatataaaactttaaaaattcttttaaattaaaaaaatcagtttgggacctactttaaaaagtgtgagagtatacactttaaaaagtgtgagagttttaaatttttcatttggtgctactcagagataaaatcttgaaaacaacttctatgaagaacattgtcctcagtgacatgatttattgctacatagcaaaggaagtaaaccattgtatttaggagcataagttctacactaaaacaggcatctgctctaaccttaatgtctaatttgttattttaccttagacaagttctttgtcccctctaagccctttctttccatttctataataatgtaggtacttaattggtcagatccttctaaatgtcacataaaattatgtcaagatctagaaaaatttctacacagattaagtgtcatgtatgtatattcacagaagttgtcatagacaaaactgtgtaaaggagagggatgtgcatgttcttaggctaatctcccagagggatcagggattggtatggtctcccagaatgaataaaataagttcaaaaggaggtaaaaggaggaaaaaacatcactacccgaaggggcagaaacactgtcagtcacaatagtgggagagcacaaggcatgtgatgcaaaaattaagaactgcacctttaataaggaagatattgccaataaaatagttctacttgtatgaaataaagctagaacttccctgcctaaatcctgtcttttttcactgtttctgttgtaactctggtttacattatgatcttattcacaatttctgcttgcttgatatttcttaattctgaaatttaataatatgcccttcgtcgtgttcccccaacttggttcctgcttacaattcaattttgttatccaaacttctttttctggtcctaactctcagttttgcctgagtgggcactaaaaagttatcttcctcttcctcttcttaatgggcacatgggagagaacacaaaattctaagagctcatatcttagcgtctaattgatacggattaaaatcccaactctacctgggtagcttggtaaactcagaacttctctgaacctcagttttctttgaatagggataataatttctaaccaacagagttactgtaaagatagaagaacatatgtcacaataaacatttagcatactcaacatttagaaaataattgctcttattaaaatttttcccattattactgttgctgatgcaataaatggaaatatttattggagttctgaatatttttgaaatgaatgttttgtaaaatcagacacattatgaactgatatgaaagatgttcctgtgaaagaggaattgaaatgtgaagagtcacaaattttacgctttctctggaaccagaaaccaaacttaaagtgttctccagaactggaaagcaaggggacacataacaggctgaaaagatctgctatgagtgttgttacagactgaagtgaaagtgactgctggttattataaaatgttcctatgacttgtccatattgaaacagaaattataggcagaatgaacaggagggaacacaaattggctcaacctcttttacctggttaagctctccattgtacccaaatttgggccatttaattccacaaatatttattgaatacacactgggtatccagaatgtaaagagtctcaatacggaatgaattttatttttgattttatattttgaaacagtcttcaagttatagttataaatcaaatgggataatcacataggttttcagtcattaaagtaaacatatttttttcatttttttttaatgaacaggatttgctagtccacttactgggatagcggatgcctctcaaagcagcatgcacaatgccttgcacatctatatgaatggaacaatgtcccaggtacagggatctgccaacgatcctatcttccttcttcaccatgcatttgttgacaggttggttaatatttctttataaataacgtgctcattggatttaaataganggtgcctatcaaatgtgatttaagttattaaataaaagctaagaagttatggtagtctattgtctgtgatcaggttgtcaccaaaacagaccttaggctaagaatttgcatgcaaatgtataataaagaaagtgtttataaagataaattaaaagaaggtggattaggcaggatacaaaagaaagaaaagtaaaataagtgtacaatgtcagttgaaatccaagactccactagatcctggtagaaggtaaagtataccctagtttgtcctaccttaagaaaaagacagatgagtctttgtacttccatgctaaatagccattggctacaggatgccctgaggtaggggatgtaaaactcccaggagcttgagtccagataggctttgtggccccagtacccaagggcagccttctaaaggcttcaggagaaagttgttaagagcaaagaatgaaaaagcaggaggatggacacacagaactgctataggaatttaaggccatgtgggcctggcactaacctactacatctgtcatcaatacatctttccttctggaaattgtattgttatttcttctctttttgaacctaacacactttcatataaggaagtacaaactgatctcttccactggcctgaatagtatatgattaattctccagacagagtgcactatggcccaactgtcctatttaatgtgatttaattctcttggagcttttatttcccttattagccttcttccattacatttgtaatgtcttagatatattaggttttagacttaattgtaggtgatgatagcagaaaagaaagtattcagaggaaggtcagctgtctactcttgaaattttcaagaagaaaggagaaaataaagcatcaaatcatgactgacaaatgctatggagtgttctttgtcccctctacagtaattttctcaccacagttaatgaataaagggcacagatttatacctgccattaagataatactatcatcctcttgggtaaaaataagaggagttatttttcgtgttttaaagataaggaaactgaaactgagaattaaagattttacttaatttaccaaaatcttctcttcattcatgtccacaggaacatggacataaaatcaaataagaaagtgaccattatccaggaaaatcattaggcagatttttattggcttcatggcaactctcatataatgagaattaagtaacagtctgtgttaagttttattcagaaatcagtgtataagaacatgtatgaacaccaaagtgttggtgtcaataccaacatcacaaccacctatacccatacataagagagaaaagcatagtgctggaataaaatgttatcagaaaagataaattgaacgctttttaaagaatcatttttatatcactttttggtgtaaattttttgccatttttaatatctagaactacccagtgaactctaaagatttaagtatgaccactcttgccacctccattcaatatagtattaaaaggtctacacaattagcaattaggcaaaaaaaaagaaaaagaaaaactatcaaaatatgaaaggaagaggatattgtttctgtttactgatgatctgcccttatacacagaaaagcctgagaattcactggaaaactgttaaaactgataaattaagtaaacttgcaagatacaaatgcaacatacaaaaaattagtagtgtttctgtacactaacaatgaactatctcaaaaagaaactaagaaaacaaccccatgtacgacagcatcaaaaaataaaatacttaggagtaagtttatccaagaaaatgaaagatgtgtacactgaaactatacaatattgataaaagtaactgtagaacacaaaaataaataaaaagatatcctgtattcatagattagaaaaattaatgtcgttaaaattactatactacccaaagaaatctacatattcaatgtaatcctatcaaaataccaagacattcttcacaaaaatagaaaaacagtcttcaaattcatacggaactacaaaagaacctgaatagccaaaacaattttgagcaaaaagaacaaagcatcatatttcctgatttcaaaatatactacaaaactatagtaattataatggcatggtaatggcataaaagaagatttattgttcattgaaacagaattgagagcccataagtcaatccaataatttacattcaattaacttttgacaaagatgccaaaaacaatggggaaaggacagtgtctgcaattagtcgtttggggacaattggatatccacattcagcagaatgaaattggacccatatctaacaccatatccaaaaccaattcaaaatgaattgaagacttaaatatagggattagaaattgtgaaactgctagaagaaagcatatggtaaaagttccaagactttggtctgggcaatgatttttttggagaggagccccaaagcaaaggtaacaaacacaaaaatagacaaataggattacttcaaactaaaaatctccaagcgaccaagaaaacaattaacatgatagacagacaacttacacaataggagaatatatttgcaaactatacctctgataaggggttaatattcaaactatattaaaaagtcgattcaatagttagaaaatagaaaaactaattttaaaaattgggcaaaggatgtaaatagacatttctcaaaagaagatatgcaaacgtccaacaggtacatgaaaagatgctcaacatcactaatcatcaggaaacacaaatcaaaaccacaatgagataatattaatgttacttcacaccttttagaacagctattaataaaaagacaaggacaagaagtattagagactatgttaaaaaaaaaaaaaagagggactttaggaagccaaggcgggcagatcatgaggtcaggagtttgacaccagcctggccaacatggggataccccttctctactaaaaatagaaaaattagccatgggtggtggcagacgcatgtaatcccagctactcgggaggctgaggcacgagaattgttttaacttgggaggtagagtttgcagtgagccaagatcatgccattgcactccagcctgagtgacagggtgagacttcgtctcaaaaaaaaaaaaaaaaaaaaaggaaggaattgttgtactgttcatgggaatgtaaattaatatagtcatttgggaaaacatagcagtttcttaaaaaattaaaaataaaactatcatatgattcagcagttccactcctgggcatgtatcgaaagggaaatatatctgaacttccaagttcattgcaacattattcatataaggcaagatacaaaaccaacccaaatattgataacgatggatagattaagaaaatgtggtatatatacacaatggaacactattctgccataaaaaaggaaaaccctctcatttgcaacaacacggatgaacctggagtttagtatgtgaaataaaatgagtcagacacacaaagacagaaactgcatggtctcacttatttgtggagtcaaaagaaaatttaaactcctagaattagagagtagaggatggttactgggggctggagctggggtgggttggagggaagttggacaaatgatacaaaatttcagttaagtataagaagtaggctgagcgcagtggatcatgcctgtactcatagcactttgggaggctgggatgggtggattgcctgagctcaggagttcgaggccatgctaggcaacacagtaaaaccccatttctactaaaaatacaaaaatttcgccaggcatggtggtgtgcgcttgtgatcacagctgctcaggaggctgaggtaacagaatctcttgaacctgggagaccaaggttgcagtgagctgagattgtgcccctgcactccagcctgggcaacagagtgagattccatctcaaaaaaaaaaaaaaaaagtaaattaagagatctgttgtacagcgtgatgactaaagttaatgacaatatattgtattcttgaaaattgctaagaaagtagattttaactgttcttagcacacgaaaagtaaaaagtaagtatgtgaagtaatgcaatgttaattagtttgaattagtcattcacaatgtatgtatacaggcacacatcaaaatactgtgggcttagttccaggccactacaataaagtgaatatctcaatagagacacaaagttttgggtttcccagtgcatctaaaagttacgtttatggaatcaacccaggtgctcatcaatggtgtattggacaaagaaaatgtggtacatttacaccatggaatactataagaaagaacaaaatgatgtccttcgcagcatcgtggatgtagctgtaggccataatctgaagtaaattaacacaggaacagaaaaccaagcactgcatgttttctcttataagtgggaggtaaacattggctacatatgaacataaagatgggagccatagatattgggaactactagagtgaagagagaaggaggggcataacagctgaaaaactacctaatgtataaggtatactatgttcataacctcgatgatgggttcaatcatacccaaacttcagcatcatgcaatatacctttgtagctaacctacacatgtcccccgattctaaaataaaagttgaaaaaaaaaattaaaattaaaattatgtttatactttaatgtagattattaagtgtacaatctcattatgcctaaaaagcaatttatataccttaatttaaaaatactttactgctagaaaatgctaacaatcgtctgagccttcatcaagtcaaagttttgctgggggagggtcttgccttgattttgatggctgctgaatgatgagggtgatggctgctgaaagctggggtggctggagcaattttttaaaataagacaaaaaggaaatttgttgcatcagttgatactttctttcacaaaagatttctctgtagcatactatgctgtatgatagcattttacctatagtaaaacttcttacaaaattggactcaatcttctgaaagcctgctgctgctttatcaactaggtttatctgatatactaaatactttgttacaatatcaaaacattcacagtatcttcaccaggagtagattccatctcaagaaactactttctttttttaaccataaaaatcaaatcctcatgtgttcaagttttatcatgagattgccacaattcactcatacctttaggctgcacttgtaattctagttctcttgctatttccatgatatctgcagttatctccaccactgataccctgatcccctcaaagtcatctattaggattggaatcaacttcttccatactcctattaacgttaatattttgttctccttccatgaatcagaaatgttcttaatggcatctagaatggcgactcctttccaaaaggttttcaatttattatgcccagatccatcagaggaatcactatctatggaatatatagccttacaaaatatacttcttaaataagatttgaaagtccagattactctctgatccatgggctgcaacatagatacgtgttagcaggcatgaaaacagtattcatctcctagtatatcttcctcagagattttgggtgaccaggtatattataaatgagcagtaatattttgaatggaattgtttttccagggagttggtctcagcaatgggcttaaagtattcagtaaaccatgctgtaaacggatatgctatcatgcaggctttgttgtttcatttaaacaacaaaggcagagtagatttagagtatttcataatgggagtttcagaccagtaaatgagcactggcttctacttaaagttaccagctgcattagcccctagcaagagtatcagactatcctttgaagcttaatcctttattatcctttgagcattaatttctccttagtagctgtgaaagttctagatggcatattcttctaatagaaggctgttttatctacactgaaaatctattgtttagtatagccaacttcatctaatatctaaatcttctggataacttgctgcagctttccattgcacttgttgcttcactttgcagttttatgttatgaagacttctctttccttaaatcttgtaaaccaagctttgccacctcaaacattgtttctgcagcttcctcacctctttgaccctccataggattaagagagtcagagccttgctctcaattaggctttagtttaaggaaatgttgttgctggtttgattttctatccagaccactaaaattttcttcatatcagcagtaagactgtttttctttcttattgtgtgtgtttactggagtagcactttgcatttccttcaagaacttttcttttgcaattgcaacttgactaacttttgcacaagaggcctagctttcagcctacgtgagctttcaacatgccttcctcactaagctcaatcatccctagttttttatttaaagtgagagacatgcaactctttctttcatttgaacacttagaggccattttagggttattaattggcccaatctcaatatttttgtgtcttggggaatagggaggcccaaggagagggagagattcaggggagtggctggtcagtggggcagttagaacacatgcatttattaattaaagtcacctttttaacattggcactgtttgtggtgtcccaaaacaattaccatggtcacgtcaaagatttctggtcacagatcagcataacatatacaataataatttaaaactttgtaatattgcaagaattaccaaaatgtgacagacataaagtgaacacatgttggaaaaatgggagtaacacacttgccaaacaccaggagtagattccatctcaaggttgccagaaaccttcaatttgtaaaaaaaaaaaaaatgcagtatctgtgaagcacaataaagcaaaccacaataaaatgataacacttatatttccaaacataaatagcttataagcagatgaaaaaatgctcaatatcactaataacctgtgaaatattaactgaaaccacaatgggatatcacctctgacttgttcaaatacctcttatcaaaaagataaaagacaaatgttggagagggtgtggagaacacggaacacatgcacatttttgggtgggaatgtaaattagtccatggaaaatagcatggagcttcctcagtaaactaaagatagaatcatcatatgatccactcattccacttctgactatatatcaaaaggaagtgaaatcagtatgtcaaagagttatttgtacttccatgtttgttgtaacataattcacaataggcaagatatacaatcaaactaagtgtccataattgggcaaatgggtaaagaaaatacagtatatgtacacaatgaaatactatttaccatttaaaaagaaattctgtcatctatcataatatagacaaacctggaggacattacattaagtgaaataagccatgcacagaaagacaagtaaccacataatctctttagatgcagaatctaaaaaactttgaactcgtaggagtaggaaatagaatcgtagtatcacaaggtgatgtgcaggagtggaaggggatgaatagggtcaatgaaaatgttagttgaagggtacaaagttttagttagacatgagaagtaagttctactggtcttctgcacagcatgatgattatagtaaataatgatatattgtatcttttaagattgctgagagtagattttaaatgctcttaccacaataaaatgataaatatgtgaggtgattgccattttagcttgatttaatcactccacaatatatacatatatcagcatcacattatgccccatacatacctgtaattattatttgtcaattaaaaataaaatttttaaaagtgtcaatttgtctagatgccttgatgtttcccacttgtttttataaataaggttttattggaacacagccatgatattcatttacatattgtcaatggatgctttcgggctacaatgtcagagtcgagtagctgtgaccaagaccacgttgtttgcaatgcggaaaatatttaatagctagccgtttgcagaaaaagtttggggatccctgccaaaccacaaaattccatacacactcacacacacatacacacacacacacacacacaccagacaagagaaagaggttttttctgtagcccacctatatttaaagaaagtactatcattaaattcaatgtctgtaggcatgtttgtttagtagagagaatgtcattctgtagatatatagctgtgaaaagccactctgcaacctttgaaaattagaattttctgctcccttagaattctctattaattctattttactattagacatttgcataattattaaaataactcaaaaatattaagcaaagatcaaggtaatttctgagcctttgtaacaaagctgatgaagattctgatgattcaattatcattatacagaaagctagagaactgtgggttaccacagaatattgtgtggcatctgagccatcctctcaagttgctacctatgaagactcatttttccgatcagacaggtctattgactgccattcaattatgcacaaatatatttattggcaaactatgtactgagtgtattttcttaaacattccacatttattcctatttctgggctctgattagaccattcctcaaatctgtagcctacttttcttgacctatctagtttgtacacaaacttcaagactagtttcagttttgacctcctccataaactatgcccaggtcatgtctgtctataactatcactccaaaatctaattatgaataccatttcccaacttggcattcagtgacctcaggtcggtatcctgaaatcagccatggtgagagtatttacaccatgaaattggcaaatggtacacgtcagggcttttattccaaaagacctagttgttaaaataatggccaacacaccactgctctaatctattaactcacagcacattctttctatgtcccttattttggacacatcaattatctttttatttttatctcctcatctgttaactgttttcttggctgcaggaagcttttttgtttaatgtaatcctgtttgtatattttttattttcgttgcctgtgctttgaggatcatttccaaaaatattgcccagacccatgtcatggagcgttccccccattttcttctagcagtttcacagtttcaggtcttacacttaagtctttaacccattttgatttgatttttatatatggtgtgagataagtgtctaatttcattattctgaatgtgactatccagtggtctcatcacaatatattgatgagcctatccattgtgtatttgtggcatctttgttgaaaatcaatcataaatgcttgactttatttctgggatgtctattcttttccattggtcaatatgtctgtttctatgccagtactattctgtgataattactacagctttgtagtatattttgcagtcagatactgtgattctcctgctttgtttttattactcaagattgctttggctattcaggatcatttgtggttgcataaatattttagaattgtttcatttctgtgaaaaacatcattagaattttggtagggattgcattgaaactgcagattgctttaggtagtatcaacattttaataatattctttcttccaaattttgtattttattatttttatttatttatttatttatttttgagacagagtctcactctgtcacccagactggagtgcagtgacgtgatcttggctcactcccacctccacctcccaggttcaagcgagtcttgtgcctcagcctcctgagttgctgggattacaggcacacaccaccatatctggctaatttttgtatttttagtagaaatggggtttcaccatgttggccaggctggtctcgaactcctgacctcaagtgatccactcgtctcagacttcagattgctgggattacagtcttgagccactgctcccagccaattcttccaatttttgaagaagagatatatttcagtttatttgtatctccttaaattcctttcatcaatattttatagttttcagtgtatagctattttacttccttgtttaaatttattcctaagaatttttaaaatttttatttttaattaacaactaatggtatatatttagtaagtacaatgtgatgttttgatctatacatttttgtgatgctattgtaaattgattgtttccttcactttttttggatagttcattgttagtgtatggaaatgctactgatttctgtatcttgtttttgtatcctgtaaccttactgaagtcattttttaatttttaatagaattttagcagatttcttagggttttcagtatacacaatcatgtctgcaaaccgggaccatttaatttcttcctttctaatttggatacatttcatttctttttcttagctaattgctctagctaggacttacagtatttgttgattagtcatggtgagagtgggtatccttgtcttcttcctgatatgagacaaaagaagttctactttttgccatgaagtatgatgttagcattgggtttgtcatatatgcaaactttattgtattgaggtacgttccatctatacctaattttttgagagtattatcacaaaaggatgttaaacttgttgaatacttttttctattaatacagctattaaaatgatcatatgatcatgtgatttttcacaaatataactgtgaaatttgtatattaactatccttgcatctttgggataatccctcttgatgatagtgaaccagccttctgttgaattcactgtcaaattcagtgttttagtattctttgaagagttttgcatctatgttcattaggaatattggcctgtaattttgttttgtcatactctcctagtctggctttggtatcaaggtaaagctggccttctgaaatgagtttgaaagtattctcgccacttaaatattttggaagagtttttgatggatttgtattagttctttaaatgttggcagaacttatctctgaagccatcaagtcctaagcttttctctgatggaataatttttattactaattcactctctgtactcattattggtctattaagattttctattttttcatgattcagttttggacattgtgtgtttcttggaatttatctattttcttctagtttacccaattcgttgttcttagtagtctcttatgatttttatatttctgtggtatctgttgtaatgtctcctctttcatttctaattttatttatttgcatcttcttttttttcttattctggataaaggtatgtcaattttgtttaccttgttaaaaaccaactcttagcttcatttatcttttgtgctattttcatttacttcttctctgatgtttattatttccttccttctgttaactttaggcatagtttgacctttattttcagttttttgaagtacagcattggattatgtatttgaaatattttttgttaatgtaggcatttattgttataaatatccttcttaaaaatgcttttgctgcatcccataagttttagtagtttgtgtttccattttctcttctctaaaggttttaaatttcctttttaatgttttaattgacccatttgttgttcagaaacatatttttaagtttctatgtatttgtgaattttttgaaattctttctattgttgatttctagttgcataccattttggtcagaaaagatacttgattatttcagtcttcttaaatttgttaagacttgttttgtgtctaaccatatgatctatccttatgataaaccatgtgtgtgacaataatgcacattttctgttgctgttagaatgttctgtatacatctgtcgggtccatttgatctaaaatgtggtgtaagccctatgtttctctattgagtagggtggggtggagggagagcatcaggatgaatagctaatgggtgctgggcttaatacctggttgatgggttgatctgtgaagcaaaccaccctggcaaacgtttacctacataacaaacatgtacatcctgcacatgtaccctgaacttaaaatgaaagctggaaatcaaaaaataaaaataaaaataaaacataaaggatccaattggtaaaaactatctaaaacctatcctatcacctaaaaaatattcagaaaatacaaaaagtggagaaagaaacaaaataacaaaattaatgatatttcctttttgtgaaatttctatttacttcctttgctattttatattacattttggttttattattgcattgtataggttgttcacaatttttaaaaattagttctttttgtcataaacattataaatattttttggttattatcttttaatgttttaatggtacttttttgctattcagaagttattccttttcatatggtttctttttaattcagtcatttgttcatggctttaaggtcatgaacatttgtttcttatacagtagtactatctgtaaaaagagtgaattgctctaaatctctaattttctttctggactttgcaactggataatctctttttgaagaaatgacagtaatacattagtacagttgcaggtctttattgggatttttagttacagcttaatcatgcttttagttatgattaataggtaagttacaaatagagaagttcaatttatagttaaaattatttttctcctctattcagtttaaggtttgacaagggactctaagctgttctcaggtttgtaaaaacaaacaaacaaaaaactttctggcgtggatatggggttgaaaagtttgagaaggttgaagactccaaaagaaagaattggttgaagagttgtttattctgtttctacacaaacatcagatttgggaaaaactaaagacaagggtatctgggtcattaaatcagcctaacactacaacagccatcaagcaaagctgatggtgtctgtaaatgctcttcaacttggatggtgggagagggtgtagaaagcatgaagaactatttaagaacatactaagttccaggtcttgtgacagaaatttttcatatgttacttctacagatgtgacctgcctcaggaagaaatgtctgcctcatacacttaaatttaccctcgtatgtactcttgtctaccctgtggatcctcctcatgctgtactctgcttacttgcctgttttcttaacagtgttcaccattagttctgcattgatcatatctagtttgttcatagttttattgctaggacctaacaaaatgtcaagaaatacgatatgtgtctgataaatatttaagccctttaaatattatattcaatcattcattcatatttattaattcaatgaatctattcactcattaattcatttagaaaatacttattgagctcctgacactatactaggcaataggttatagcagttaacaaaaacctcaaaagcttaagttattatcaatattatttcagttaattcttacaattaactaaaattgtatcactacaattatataaagtattgcagtccatttgtatagatgttaatataatttaatatattaatatattttatattatatattactataatagatattatatagtacattttatatactatataatatagtatatactatacatatatatatttcatattaatataatagtgaaattgtctcactacaattatgtaacgtattgcagtccatttttatagatgagaagactgaagataaagaaaaaataattcacttttctttaaatggatactaaaagatgataccacgttttgaacccagattttttgagcaatttaaatcacattatactgtttccaaccatagattatatcataaatattttggcatagtgaagagcatggaaagagtcaggttggatacacttctgaagaagataaagatatgttattatttcagagaaagatgagtgtccaggataaaatttcagaaggggcttctttggctctttattaactttgttttttgggttatctttgtttgtttgttatgttttttgagatggggtctttctctgttgtccaggctggagtgcagtggtgcaatctcagctcactgcaaactccacctcccgggttcaagtgattcttcttccccagcctcctgagcagctgggattacaggcacccaccaccacgcccagctaatttgggcatttttttttagtagaggcagggtttcaccatttggctaggctggtctcaaactcctgacctcaggtgatcacccatctcggccttccaaagtgctgggattacaggcatgagccactgtgcccggcctctttattgactttatagcacatagacctgctagtgtggaaggactttggtgaaggtggtcatttggatcttggagataaactagagagctctattctgacaactagcatttcagaaatttttccatgtagaacattgtgtcaggagtggttaatggcagtgtgggccaatggaagaaaactttttttacatttagaatctgttaattagtatccctgggagttcagataaataatgtagcttttttgagacttattttcttcatcactaaaatgggaatccctaaagaggtcctgaccaactcagaagttatagaaatcaaagaaggtatgcatctaaaatgctctctataaagagtagggagcatagtgtggtaatgaattaaagagtcagagagacctcgactgagatatgagtcagttaaccactcaatcatggagcctctgctctatataatggatatcacataattccacctttgtcagcgtgttggaagtattttaaataacactcaggtgatactgaataataagatgctacaataattatcattctccaacaatttgaataactattcttcaaaaatttgttattctcaaaagtttgtaggttttgcattattccagagcgggcatggcaaaggaatacagtgctttattggggtttagaggtcccaatcagttgatataaatgttacagggtagtattaatgttttagaagattccgttttattgttttatctattcattctacattcattcaataaatacttatttagcatgtgtgggccactcactggacacttcagcttctgcattcttcctaaacaggcatgttaatgtacatgcaaatggggattccacctatacttataagtcaagaggtagttcaagcatcaccttgtcagtgcagctttctccacttccccaaggtccttactccagtcttttgagtctccaagaatttgggggctaaccttttatgtcaagcttaagacattgtattagaattgtattattatgaattatattataattgtccagtttacctagcaagatcttgaattataatttcaattctcattttatctatcacatctttgtatctgtagttttctgtgctcagggtaattcccagcacacaatgtttaatcgaattaataaagtgtaacaatgtccaactgcagtgtgttaactagcaaactggctaagaaatgtagttgaaatatactctctgctgtcatttctcaaagcattctataaatacatttagtgaactcttgcatacaatggaaaattcagtaaccattaaaattatgtgtatttataattgttgggttttaaaatatttattatttattattaaataaggaaggttatagaataggatatttaaaaatattccatttcaaaagcatatgcatgtatattcaaacgcaaatatatctattaatagaggtgagaagggtataaaaatgttggtaatggacccctggttggtagaattatgcataaattttatttcctttgtgttttacaaattttaaaacttttttgcaacagatatgtacatttttgcaataatatcaaaaatagaggctatttccaaaactgcacagataaataagcaaacaaacatacaaaagggtagagagggatattttatcatttgcctatactcttaaagttgcttaaacttgtgtttgtttccttttatctatttttattaaagtaattactggtgactcatattttacagaattatctctctcatagattgattcaataaagagatctactaggcagttgagctccaggtcctgcatttttcctgacatactctgtatttctctctgtccagctccagcttctgaaatgccctctcagcttagcacggcctgcttatggcgagaaccatgtattcaatggctcctccttatttctgcaagtcttcaaattctccttttggtaattctctgcatggaattaactcttgcaaatccatgtctcacttttgtgtgacctattttgtcttatgctacacattgtccatgttttagcagtagattggaagcttttatgtgcatagccttcccaagaggaaagtaaaaggttggtgctagatggtgcaccttcgataaatgtcagaacagcaaaaaaagggctttagaaatatttccttctttgcacattcccattcaagaatggcttatacagaaaaaaaacaagcacacctctgcacatatgcattccttcatctgttaattcaactaacattaagtaccctttatgtgtcatgtgttatattagaccatggggatgaagtgattactaaatactattattctccaactagtttcctcgagggcagatatgtcaacaactaagtaatgtaaagcaaaacgtaactctgcagtaatagtggctcaataggacaggatatttggaagtgagaaaaagagcaccaaagaacggggaccacaggagtagtcctctttaacccctgaatctgcagcacctatcactatgcctagcataagatagtcaatgaatagccgtttgatactattgtttggaatacaattttatgactggtggttctgtgaagaatgagtagattttttacttgtgacatttgtgtgtaaaaacagtcaatatatagagaacaaaacaaaaaggtgtagaaatatgtggttgaaagaaacttcagaaaagtcaatagttacaacattacaaaaatactaaaaacaaaactaaggtttattgtgtgcttactacacaccaaattctaagcgcatcacatgaattgactcattcaatcaatagttacagaagaatagactgaaattccgagaggttaagtaaccagtactaaatactgtttcataaagggtttagatggaggcttaatagaaggaaagtgtatattggatatagacaaagaaagtatactcttcctccaacaagggagcaggaactatcaggataagggattattttgaacactagtcaagcagtgcagttactgctgcaggaggcattccaagcaaagcaagttgataaaaaatttagcatgctcagttggggcaggcagacagggaaatgaggattaagaagaatctggaggaacaggctgggcgtggtggctcacgcctgtaatcccagcactttgggaggccaaggcgggcggattatgaggtcaggagatcaagaccatcctggctaacatggtgaaactcggtctctactaaaaatacaaaaaattagctgggcttggtggtgggcacctgtagtcccagctacttgggaggctgaggcaggagaatggagtgaacctggaggcggagcttgcaatgagccaagatcacgctactgcactccagcccgggcgacagagcaagactccatctcaaaaaaaaaaaacaaacaaacaaaaaaaacaaaacagaatctgaagaggaacaaacagtgggccaaaatttaagggtggggagatgtgccatttagcatgctcagaagcttgggccagcagttttaactgattcttaaatactccgatgtggctggggctcataggagtcaacctgactggacaggcactagcttaggaactgagaccgaggtataaaaggcaggacatgacatccaccactaaaactcacagtctagatactaaattctaactgtgaagaggaatcctgtagtggaaggatcatgaaacctggagtcagaagttccgtgattatgtcctgggtctgcttcatgcttcttttgtgtgatcttaggaaagttgcagatctccaagcctaattttcctcacttacaaaaaggcagtaataatactactttcctcataagaacctgagttcatactttataaactataacacattaacaaagactagctcctgtaaagagctaaagtataaggggcttaaaaaaatattcaatgcttttgttctttactcactgtactctaaatgctctccagtattggcatcacctcactgattctcccttagcgtgtctcttaaatgtgtaggaatctagtttaggtgcaaacctgaaacaatacattccaggaatggccagcctgcctccctccttagctacagattaattacatcttctggagtgacattttggctgtattttccagtgaggcttctcttctactctactccccaagcctccccttggccatcctgctaagaagactgtcctaacccacatgccttcaaaccagacgccttgccaacttggcagcccagaaacagtccaaccagaagggcggcagtaagaaaggtccctggggcttcaggaatgaacagcagattgcttccctgctggtgactgcaaggctgaagcttgctcagaaaggcagaaatctcagggttatgggggtaggtaagcttggaaaccagaaaaatgtcttaaagtctattctagcaatcagatgggatggcagaggaggacctatctgtttctgggtttcttttcacactgttggattgtgaccagctttaaaaactgctccctgatttgttctctaaagcagaattaatgccctagaacaaagagcggttataccattatagtcatatttgtctatattctgacagctgtttttctttttgatgttattgttagatttagctcttataccactctgtgcttgttagactgattcatggtttgtccatctctcccactaaatcatgggttcgtggcagacagcatctatgtatcgatcatttttagcacctagcacagaacctagcacataggagacattcattacatacttattagactaagttgttgtataattgataactctgaggcaggcaggcatcgactgggttatcagtagcattttgttgtggagtgaaatattaatctaagagagttgaattgctttctatcaagtgatgaagacatcatgtactataactaacaacctaaagaatgttcctacaacaatgtagctgctctttgtaggattaatatattctagtactaggaaagttaaattgcttaaattaaaatattgataacttaaaaagcttaaaggcagggggaaaaagaaacatgacttgtcattattgctgaaatcttaaagagaatttcaagatcataattcaaattgtttattttacaaaaaaggaaattggggcccagagaagatgatgtgcccaaaggcacacagttttctgcaaagcggagggaagagtgtcaacctcttgccctgcagattaggagatcctgggggcaatgtggaatatactcaacatagcaggaggatatttaggcagacagaagcagcatgactgtaggatagatctttaccataattatttcgagagccaaatgtcagacccactgaaatagcaccaaatatcagagccaagggatgaacagagctctaaagtaaatcaaaagcccagaaatcaggagactaagaggcagtaaatcatgtgattaagatcatagattttagcatcagacatgcctcattttgaatcccaaacctgctacatctagctacataatctctggcaagctgcttattcttccctaagccttctttttctcagccataaaatggtgctaatatttgtagccatctaaagttacagctttgatttttagtatgatattgtgaaaatatatatgtaacaatgttcttagcacacaattactagatagacaaggaacttgctattaaaatatttgcattctagtgaggagaaacataagcaaaccagaaaagaaataaataagcacaaaattcagttaagcactatgatgtgatataatatctatatattttataaagaattacttgggagaaggttccagttgagataggctacctatagctggcttctctgaggaaatgacctgtaatttgacactgagaccacggagaagaggtagccatagaaatccctctgggacaagatttttaggaagcagaaggcacacatttaaaggtcccatggcataaaagagcttgtcttgcttcaggtttggaaaggagactagaaaagctaaatacggtaaacaagaggaacttggtgcaatatgagattgaagagatcagcagagatcaatagagccctaagtacagtatagaggaaagagtttaaattattttaatccaggtgctgaaataatttttagattgacatttttaaaagttgtcttggctattgtgacaaatagactgttagagtgaaaacttcaaaagtgacatggattactctattgcattggtctaaatgagaaatgatggtgatttcaaccacagaggtgacaatggagctattgggaaacagaaaaccgaaccttatgtatttcagaggtaaaaccaacagggcttgttaatggactatgtgataatatagatgtagttagtaattttaaaaataaagaaaaaagagtaatcaaagattactccaataattagaagcattagagagaagagtggagatgtttactgaagtagaaaggatgggtaagtaataaatttagcaaagaaaatgaactaaagttctctttgaacatctttgggtctttttaggatagggcaaatagatacccgaaagaggctgccaagtagtcagttgaatcttggagtatcaagctcaaaagagagaaccaggttagatacatgtatttggtagttttagccttatctatttagcattaatcacttcgtgttatttaatcatttaagttttaaaacttaattatttagcattatttaaaatcaatggagtgaatgaggtcacagaaattgagtataaacacagaagaaaaggaagcagtctggcataccccatcattaaaaggatgagccgatacagatgagtcagcaaaagcaaagaagacagagggtcattgaccagtgaggaagcaggaaaaaaaggacattaagccacaaaagccatgtagccaaaaaaaaaaaaaaaaaaacagtggaaaaataaatcaggtactcttaagagatccataaaatgaggagagaaaagtacttgttgggtctgaaaacacaaggatgatcatgcccttggcaacagaaaagtttcagtagaatggaagcttcgggagccagactggagcagattctaaacaaaacttttgaaaagttttcacaaaataaggagcatttttaagtgggaagcaggaaagaggatatgaacaagaaaggaggatttgagatttcctttttaagagagaggatatgtattagagaatgattatatgttgttgaaaatgaaaacattcagagaaagagacataggagaaaaaggaaaaaattgccacagcaaggtactggagatgtgaaatctaaagcccaatggagagaggagcctttgccatgagttggaaggaagcttccttcatgcctgaatggagacacaagatagagtatagatgcatgtattgttcttggacaaattagggtgtactgatctagttatttctattttctgattcaagtgtgaagggaggtcatcagttcttaaggggctgggggctgactaggagaataagaattagaaaggaagagtttgtgtaagttagagaaaacaatattagacaaatcatccattatttatgtcattaaatatatcagtggtctgaatttaggaagcatgttggtctggacaacaggaaagaactatagtgtcatgagtttcattattatctgcttgatattacacaaggcatttccatgtaaccatcctctttaatccttaaaaatgaatattaattatttccttttttaaagtctgaaggcggaggcaaagaaagattaaataattcgcccaaagttttagcactattaattgactaaaattaggactttgactcacttctgtcttactttaaattccctgtgttttgattctgtcattatatcaattaggaagtaactgataatcatatcaaaaacattatttatagggtggtatattagttttctagggctaccataacaaaataccacagactaggtggcttaaaaaacataaatttattttctcacaattctggggactagaaatccaagatcaaggtgtctgcagggttaatttcttctaaggcctctctctttgacttgtagatggccatcttcttgctatgtcttcatagggtcttccctgtctgtgtgtctgtgtcctaaacttctcttcatataaagataccagtcatattgcattagggttcaccctaataaggtctttaaaaactttatcttaaaatacactcacattctgaggtacttgggattaggacttcaacatacaaatgttgcagggaagcaattcagcctgttacaagtagtgagaatgaaagtcaaacagtagtggaataatgacagacttgacgttgaaaatgttaaatcagacctagcttttaaaattgtgatgataaaatagagaaataagaaaacaaatcatttgaagggagcaagaattaagaaaatagtattttagaattttttttattttaagatacaggtgactgaatctatagtttaagtgaaatttgctgaagaaatgagagaaaaaacattaaagcatgttgaaatgtttaaacaggtactataaaacatatgggtttaattccaaaagatattctgtagggaaattatctcagattttcctcaaaggaaaaatgaattaaagaacaataactaatgtataaaatatctataagaaatgctattttgaaaagctcctttaccagattattcataacatatctgtttatcatatgactgtttattaatgtaattttgatgacataagggtttcctgaagtatcaaaacaaatttctgcttgtcggattgccacagcagaaaacaaataataacatgcatggacaatacaaatgttatttttatcctaaagtaaagcatgcccaagatacatcttgttaagtacaaaatgtcacaacaatctagaataacaataaggataagaatctgttgaatactcaggaaagaaatattactaaattcaaaaagtcaaagaggaaatggcagctgaaagttttctgtagctgtgtccttatacaaagcatatttattgaaaggaaaaaagttttgtttctgtttttttagaaaaagtgctttcccaagagaaaaagaagcagcacagctcctgtacgtcaggtaaaaaaagtcaggagaaaaagcttcaagattcacatgatggggtattcttttaccaaaccaggaatcaattgctttggagaacggaaataacatttttgaaatcccttaacaccaatgatccctgttctgtgaggtgccttgatgctaatcagacagttgctcatatcagttaaatcattgaaatgtaattacctctagtactcagtgttgaggtatggaggtgagggaagcaggccttgagaaaagcccttactgtagtagtgtcactcttaagttgcgtcgccttcagttatgccatccccatatatttccttttatcctcactacaaaatgaggacattggcttttctgatttccaatgtccttctattttttcatgttctatgagtaaggaagatatttgatttatttttaagatattttatgtgcaattcttaaagttgatatatggctttctgttctagtgagatattagactatgagaatctgaaaattcccttgagacgatcagtaccaagccagaaaaatataataggaaaatttattttacatgcatatctatctctcagaacagtaaggctaataagattcagaaagaaaaaataaattaaaacaggagtactgatctaggaagctggcctgtaccttaccttggctgttggggttttggtctcaataacctagggcataagattttaaagtccataatggggcagaaatgaaagacttgagcccacccaaggctaggatcaaaatgtccacataaatcaaagaccctagaaatctgtatcattcatgaatgagtatagtagaaaaacaaaatccactacaagtcaaaggaagattttagccttcaagacctggatagtaaaataattccctgaaaaattagaaacctggtgcttgcactccacataagttttgtgttttgaaattaaacaaagtactgattcagaaaaagcaagtgcaaaacctctgaaattaaaacaaactaagaatttcaaggaacagattgattagaataactggaccattgtaaactagggagactgtacaggagaataagatcggggacgtaatgaggctccttgaggatcattttaaggagtttcatgcttcaacatgaaaaggaaagcaacattcaggaaatactcctttgttatgtcatttaattatagaaacagtctcatacagtcatttgtttttaaaataaataaatagagtattttgaaaaagtgcttctgaagtacaaagtggttaagtggtaaattgaatcacaatctgatcccaaatccaggttaatttctctatattacatgactttatttcttctttcacatagcaagcaaattagtcatacctccaaatttaaacttcagaattctaacttatttcagctggattagaatttctcttaattcttatgctctctttctgtacttgtcaatgaaagatcctttcactttcttcctttatagttaagtcagtacctattgcaaaagtagacttcttagcctataagcattgcatacaggtgacaagaatttgccaactacaaatgttaactgcttgaagagttgtttttcaaatatctgtttttattgaggtatttatttagtattgttgagttctgctcttacataatacttcgtttccaggtaacacacagccctgccaagtattggtatctaggtaatgctgaccattttaaatgaacgtttcaatattgagtctacccatccacgagcatggaatgtgtttccatttgtttgtgttgtctatgatttctttcatcagtgttttgcagttttccttctagaggtctttcacctcgttggttaggtatatttctaagtaatttattttattttatttttgcagctattttaaaaggggctgaattcttgatttgattctcagcttggttgctgttggtgtatagcagagctactgatttgtgtacattaattttgtataacgaaactttgctgaattcatttatcaattctaggagctttttggaagagtcttcaggtttttctaggtatatgatcatattatcagcaaacagcaacagtttgacttcctctttaccaatttgtatgccctttatttatttctcttgtctgattgctctggctaggacttccagtattatgttgaatggaagggcgagagtgggcatctttgtcttgttccagttctcagagggaatgcttttttcttttctctttcagtattatattgactgtgggcttgtcatagataggcttttattacattgaggtatgtctcttgtatgccaattttgatgaaggttttaatcataaagggatgctggattttgtcaagtacattttctgcatctattgagatgatcatgtgatttttgcttttacttgtgtttatgtggtatatcacatttactgacttgtttacattaaactatccctgcatccctggtatgaaacccacttgatcacggtggattatctttttgatatgctgtttgattcagttagctagtattttgttaagcatttttgtatctatgttcaccagggatattggtctgtagttttttgttgttattgttatgttcttttccggttttggtgttcgggtgatactgtcttcatagaatgatttagggagaattcactctttatcttgtggaatagtgtcagtaggattcataacaattctttgaacatcggatagaattcagctgtgactgtgtctggtccaggaccttttttgttgttgttggtaatttccttaccatttcaatgtcgctgctttttattggtctgttcaggctttctaattcttcctgatttagtctaggagggttgtgtatttccaggaatttatccatctactctaggttttctaatttatgtgcataaagatgctcatagtagccttgaatgatcttttgtatttctgtagcatcagttgtaatatctcccatttcatttccaattgagcttatttggattttctatcttcttttcttggttaaccttgctaatgctctatcaattttatttatcttttcaaagaacaagctttttgtttcatttatcttttgtatttcttttgtttcaatttcatttagtcctgctgtgatattggttatttcttttgctgggtttgggtttgttttgttcttgtttctctagtttcttgaggtgtgaccttagattgtctatttgtgctttttcagactttttgatgttaaaggttgtaaaccttcctcttagcatcacctttgctgaattccagaggttttgataggtcgtgtcactattattgttcagttcaaaaaatattttaaatttccgtcttcatttcattgttgatacaatgatcattcaggatcaagttatttaatttgtatgtatttgcctggttttgaaggttccttttggagttgatttccaattttattccactgtggtctgagagagtacttgatataatttcaattttcttaaatttattaagatttgttttgtggcccatcatatgatctatcttggagaaaggtccatgtgctgatgaatagaatgtatattctgtggttgttgggttgaaagttctgtaagtatctcttaagcccatttgttctagggtatagtttaaatccattgttttttcattgactttctgtcttgatgacctgtctaatgaaaaataaattaaataaataaaataaaataaaatgaatgttccttcctcttttagttttaggaagggtttgtatttaattggcaatattcctttcttaaatgtttggcagaattcaccaataaagtcagctagattagaaattttccttgtagaaaagatttaaaattaaaactcaattggtttaataaatttaatgttacccaaccaatctatttcttcttgaatgaacattagtagtttgtggttttcaaagaagtagttcattttgtttaaattgtcaaattagtggtatacaataattcataatgtctacttcttatccttttgatatctgtaggttctgtagtgatgctgctaatttattcttgttggtggtaatttctatctcttctaattttttataaccagcctaattagacctttgttcattttatttgtctttttttaagaggcagctttagtttacttgattgtctctattgtttttccattatacatttcagaaatttttgatatttattattattattacttgctggtctagtatcttctgacaaaataagtcacatattttaattaaacagtggcattttacttctgttctcatctttgacatcattaaactgccatatattgttcaaaaattttacatatggtttgttatagaatcagggtgaaatatgagtaataaagacaatgacctatatctgcacatgtggctaatgagcacgtaaaatattgttaataaaactgaagaatataattttaaactttaatttaaaatcgggtatttgtttgttattgaaaaacttacaaatatttttagagcaacttggatgtgtgaacgtaagttattgcctgtaaaatgtatgaattctaaatacacacgaagtatttctgatactgtcctatgtcatatgccttcaatatatactctataattactaggtttttcttaactttgtattaaaaaaaatcacattaacccacattcgactagctataaagaactttgttttctatagttttatacaaaatgatagaggtatgtgtgtgtacttgtgtatatgtgtgtgtgtgtgtgtgtatatgtgtgtgttcatgtttcatattagtcaagattcaatgagaaaaaacagaaacaatgctagttgttttaataatgtcagttgtttatataataataaataatagcttaaatagatatttgaaaattcaaaagtggaaaaaaaactgaaaatgcctagagataggcattggaggaagcagtaccactcctaggactgggtaaaaataacaaagtagtaagagatattagaatctaatagttttgggaagggcttcaaaaacctgaactcagatttctgaagaggggacactgtttatttagtagtgatatctcatatcacctgacattgaaggaggagcctcacagggcagtaattcaaactcctgagtaggaggctttagtcaactggtactgatagctcatgagtatactagtgctctacagaactagatctcagatttttgagcagagagggatgtaggggtgtgagggaatggggaatacggcctaaagcatgttgaaacttcttaagaggaatgataatgctgattcttggtgtgctgataagaaagctagaagctagactctactgctcttcctagggtcaagaacagtcactgaaataaacaagaaggaacaagtcctttgctgttctagcctatatgtagtgtctatcaggggttcaactagcaaaagagaaatgcagcttacacattctcagccccagtatcccaaagtggaatgtagtaggacatcgttggggctggaaacaatagcttaaaaactggcacagtccacctcttgtctatcaggcattgatacacatttaccctcccatacataggtaaatttcacacaataacaataacaaacttaaggtatttttttcaaacgaagattatttcattctatcttcatgaagaggtaactaatgtcccaaaagccatttctgattaattattcctttctgattaatagccatattatccgtctctgggagatgttatataaacttcaaattttgtcatggtttatataaacattctgtactctaaagagggaattataagattaaatatcgttgatcacacatatgaaataatgagacatgaaatgttaatatataaaaatactgtatatgtatacacacagacagacacaaattaggttatatgtgaaaacacagaaggaccaggaaagaaaagatgcgtagctgctgcagacctcattttatttatgtattttttttactacccattaaatgttatatttgcactcagccagcatttcagctggccaacgctctctacctatcaaatgactcaaactttctttcccagagaatttgaattctgagtgattttcacctttctttggttactgtagtcttccattaaattattgaacacagaaatgctaaaaattcctcaaagaaggccttgaatttcatgcatatagtctttcctgcactactatgtagcaacaccccaaaagtatcttgagaatatggatttttttaaaaaaatcatgttcttcataaaacttaacaatgtgaaattgtgttttggtgcaaagtcccaaaagattgtgctaattgattccacaacacttatttttatgcctttaaattcatgttgaaggtgtggcattatgacaatggagtgattgattgctatggtgaaaggcggaaaattttcttctcaaatggattctatctgaacacagatgagaaactttttttatgtttcttttaactatttataatttgaggaattatgacacctgataccttgaaagtagtgaaggagaaaaattgtgtttccatattagctatctatatcaaatcaggcaagaacaaaaaagaaaattgattttttttttgctagaagcctgatggatgtaacaacttttcctcaaaggaaaaataaaggaaatctcttattacctatatggcaacatctggccaaatgaaaatgtgcaaaaaaaaaaaaagtgaaataagttggggctgtttctggctcagtgtgaagtatgaaaagattttaaagttaggtgttagattggaaaaaatgaggatttatgatcatcttctttgacactttttataatgtgcatcatagaatatatgagaaaaaattcccatgaaattatgaagaaacagatatgataagtggacagatattgggtgaatttaagaaaaacaaagtatttttattgtacatttaattgtaaacaatgtaaataggcactggcctgttttctaagcctttgcataggttcaacaatacggctttcttccttccaaaggctgacctatctattcccactatacagggtcaaatctaataccagagaccaactatgaggctctgataaaacaccattccttcagagcagagtggggagcagccagtgcctttgccaccctcactcagctggagttactcaatacattgttattatgtctgtttcatctattttctaagtcatacctaccggaataggtaatctattgcaaaagtatttctcaatccttgctgcacgaatcagtgggtgtctttttttaatacccatgtgcaagccccaaacacagaaattctgaattaacagatatggaagtctgggcatcagtattataatgggttgagaaccattgcattcatgcccaaaatgaatgagtctagaattcgtaacatttacgtaaccacagatgcgctaaaaatgaattctaagaacacgatgactatagcactctcctaatctctttttttacacagcctagacatcttccttgcaagcttagcactttccttctcatactgagaatcaaattctaccctgttgtgtagaatacttggctagaacattagtatttggccttattctttttagtctttttctcaagaaggttgacactatttaaacttctatcactgagaaagtaatgccaagcaggcagactacccaaagctataacctcaaccacctgtttctgaacaatagatcttacgctaaattaggtccctttggaaataacatcaaatattactactctgaagtagcgaatgtagttaggttaaaaaaatatatcagaagttggaaaaaataggaccaagaaataaaatagtaagccaaagtcaaaccagagttcataaaattcctcgaatgttcatgtttagacccctggatcccctttcagaggcttaccctacctaaaaccagaataatattctaggcacagcttacttgtgaccccacatctttccttccaagctggcattctaccaacttcccagcatatctgctggacaatcatcaatgcataatgacagaaccatatgtaacttcttaaaaatacataccactgttgttatactgaatctatcttaattttgattaataatgattccctcttatttaattatattattctttttagttaggagttgatgggcttaagaaccagattggttcttaagaacattgttttaattcctggccctgccatttactattcatgtaactttggacatgttatttcccaggggctatgttttctctgataacaaaagttattcacttgtagatattctttggtggttaaaaagagattgtatatttttagtttatcttcttttaattcaatggaatgagcaaataactgggttaaggcaaggacgtgtgcagtagtttctcatctactatcagacagttttattaccttagacaagtccctgaacttctacttccattgagagtagccactttgaagaataaaatgcaaaaaaaaaaaaaaattaaaaatgaacaaaacctaagagatctgagcaacatcattaagtatatcaacatatgtgtaacagaagtgctagaaggagagaagagagaactgacttcttaccagaaactatgaaggccagaaaacaaaggattggcatattcaaagtgctgaaagaaaatattgtgaccccagatttctatatctggcaatgttattcttcaaatatgaaagagaaataaagaaatttcccaataaatgaaaaactgagagattgcattgctggtagacttcctccaaccatgctaaaggaagcagttcaagctgaaaagaaaggacactaaacagtgactcatccaccagaaaaagtaaagagcactgtgaaagataactgcatagataaatttaaaagactacaaaaatgctctttgagtttgtaacttattttttctatcctatttaaaagaaaatatataaggctataaatccaggttggtgggcatataatgtatacagataaaatgtgggacaataacagcataaaaatgagagcatgctccatataacaggggtccccaacccctgggccatgggctgctacttgtctgtggcctgttaagaaccaggccacacagcaggaggtgagtggtgaagtgagtataacctgagctctgcctcctgtcagctaagcggcaggtgaactgggcatgtgagggatctaggttgcacattccttatgagaatctaacgcctgatgatctgagatggaacagtttcatcccaaaaccatcccttcaacctccatccatgaaaatattatcttctatgaaaccagcccctggcaccaaaaaggttgggaacagctaggaattatgtattcaacacaaaagaaggcagtaatggaagaactgaggaacaataaagaaagacataacatgtatagaaaacaaatagaaaaatgtcaagaataatgacattttatcagccattacatgacatataagtagattaagttctgcaataaaaggacacaaattggctaactggattttttaaaatgacctcaatatatgttgtctacaagagactcacattagatgcacagataggttgaaaagaaaaagatattttatgtaaaaaatattcaaaagagagcttgaataggtatactaataccagacaaaacagactttaagacaaaaattttaacaagtgacaaaagaagacataatataacaataaaaaggtcaattgctgaagaagatacaagaattataaatatgtatgcacttatcaacaaagccacacaatacatgaagcaaaaactgacaaactgaagggaaacatttgcaagtcaactataatagagactttttaataccccactttcagtaagggataggactagaccaaaaatcagcaagaaaaaacttgcgcaatactatatgccaatgagacctaacagatatttatagaacactctacccaacaacagaatgcacatttttttcaagtgcacatggagtattttccaggattaattacatgtgagaccataaaacaagtctcaaaactttgaaaagattgaaatcatacaaggtatattctccaaccacaatggaaaaaaaatagaaactaataataaaaaggaatttgaaacatttatgaatatatggggaaattaagcaacatactgctaaataatagttgaattaaagaaagaatcacaagagatttagaaaatgctttgagataaattaaaaacaaaatataccaaagccatggagaatagcaaaagtggcaatgacagagattttttatttttttttgagatggagtctcactcttgttgtccaggctggagtgcaacggcaccatctcagcttattgcaacctctgcctcctgggttcaagtgattctcctgcctcggcctcctgagtagctaggattacaggcacctgccactaggcccagctaatttttgtatttttagtagagacagggtttcaccatgttggtcaggctggtcttgaactcctgacctcaggtgatctgccagccttggcctcccaaagtgctgggattacaggcatgagccactgtgcctggcctgaaatttatggttattaatgactacattaaaaaaggaaatatcacaaattaataacataaccaccagccttagaaacaagaaaataaaaaatcaaactaaactcaaataagaagaaagaaatagtaaagactcgagtagaaataagcaaaatagagaatacgaacacagtagagaaaatcaatgaaacaaaaagttgattctttgaaaagatcaacaaaaatgacaaacatttagctagactggccaagaaaaaaaaaaaaagaagattcaaattactaaaatcaggaatgaaagaggggacattactattgtctttacaggagaaaaaattacaaaggaatactataaacaattgtatggcagcaactgatactagataaagtagataaaataaattcctagaagcacacaaattaccaaaacagactcaagaagaaatagaaatctaaacagacctgtagtaagtaaagatacaagctactcatccaaaaaaaaaaaaaaaaaaaaaaaaacaacaacaacaacaacaaagaaaatctcaggacaagatagcttaattaattgattttctcacatgtttaaagaacatcaattaaagtctttcaaaaaaagtagagtaggagggaacatttcctgacttactctatggggccagtattatcctgtgagcaaagtcagacaaaactatcacaagagaaaactacagaacaataacacttgcaaatacaaatggaaaaaaaattctaagcaaaatactgaaaaactgcccagcagcatataaaaatgtttatgtcaaagccaaattggatttatttgaggaatacaaaggtggctcaacatattaaaatcaataaatttattataccacattaatataataaagagaaaataaaatcccatggtcatctcaataggtgcagaaaaagatagtacctttcatgatttaaaaaacaaacatgcatcaagctaggaataaaaaaagagctttctcattttgataaataacacctatgaaaaagccacagctaacacatcatactcacttattaaaaactgaaaaaaaaaactcaaataattttcctaatgtaaagaacaaggcaaagatgtttgcttagactacttctgtttcacattgtatcgaaggtttaagccagggccattaggcatgaaaaagaataaaaattgtccacactggaaaggaaaaattaaaactatttctgcagataatagtgtcttaaatcataaagaagctacaaataaacagtttgaatgagtttagaaaaattgcaagatacaaaatcaatatataaaaatcagttgtatttctaaacattagcaataaacaaactgaaaaggaaattaagaaaacaatttcagtaatatcagaaagaatagaatacttaggaataattttaaccaaatcagggcaagacttatatactgaaaactataaaacactattgaaagaaattaataaagatctgaataaaataacaggaagacccccccttgttcacagattggaagacttaactatcattaacatgacaatactttctaagttagtctataaattcaacacaatctctgtcaagtgagaggaagttaaaagatcatgattcaaatgccacagagcctcactgctcttaatgttgtagtagattttcttgaataaatgtttcagcatttgctgtgtacccttagaataacttctagagactttaagtgggggagtattattttttcataattgttactagttacacttgttttgcaaaggagaagatccgtgaagcttctcccactgccaatccagaggtggaaatgcagaaaccctttttaaaaaaaaattcctacactgaatgtaatttcaatatgtaaaacagatacaaatagaactgctctaattgtgattggggtaaagtctccaaagtccatttgggtggcaagttctcaaatatttcacggactccagatgacttatttatcaaaccttggattagatgacagtattcttttttttttaccttttaagttcaggggtacatgtgcaggttgattacataggtaaactaatgtcatgggagtttgttgtacactgttggttgaagtataaattagttcaacccttgtggaagagagtgtggcaatctcttgaagacctaaagatggaaataccattcgacccagcaattctattactgagtatatacccaaagaaatataaatcattctattataaagaaacatgcatgcatatgttcattgtagcactattcacaatagcaaagacatggaatcaacctaaatgttcatcagtgatagactgaataaagaaaatgtggtacacatacaccgtggaatactatgcagccaaaaaaaaaaaacaaacaaacaaacgagatcatgtcctttgcagggacatggatgagcagtgttctttcaagccctaatatttgtgaagtgtctaatatgttatttatatatctaagaactctcctctctcctttgtaaggaaaactgcttttcttaagtgccatttctctttcactccttcaaggaaatctgttcacttttccttatcttctcagtaaatgatatctaagtatttagtgcatacttaattcttttaagctttattgacagttacgtcagttttgagtctaagcccattaggtaatcaggcctctgagaagctcatattttttcaatgagtatacctaataacaacttctaaacaactacagattctcaaatgttttgggcacaacaacaaaaaatgataaattggaccctcactgatgcttttaaaagtaaataagcaaatcataagaaatcagggatatgggagataaaaacaatgattctcactgtccaaggatatataagtgggtaggggaaagccttcaaacaaggagtttactcctttgacctttgataaaaggataagctttgtcagacgggcccaaagaggagcttgctgataagagttgtcacaaccactccacctctcagaattcctctgccttcgccacttggctgtggagtgaaatatgtcttcatagctcctattacccttgatttttcttaactgggcctttctcatttcatgaattttactactaatcacttggagaaaatagataataagtaatcaacttgggattttaatagaaatttcaaaatgttcactatcacaagtccatttggtttatattctggagtcttcttgagatgtttctgagttttctcctttgatgttctaccctctgttatttgtttgttctcagagggggtttcactagtctctcactcttccacaaattgtttgttagcagaagaaataggaatccttttctccatgttatctccctttccatagtggagatttaataaaaataaaataatccattttcctttcttgaaagtggcaattaatatttttaactccagatcgaatgatgctcagatcactagcttttttaagacatactttagtttgtcaatttttccaattggaatagaggattagaagagtagaaaaggaaaaaaactaagaaatattatgtaaataaaaattttggctggagaaggaaataaatggtaagtacatgggaggatatctaactactattttggggcaaaacgcaaagaaaatagtctgttttttagcatttgatcgatcttttcttgggctcctttttccagcagtccagatcatttgttgtgattaagatgtcaggttgtcagcttcagttgaatttgctctctgaagaatgttttacattatcttctttgttcattaggctagactttaacacatcatgctttttcttatctaaattgccaatgatattagtgttattcttgcataaattatttgtgtattggtgttctgtatatttctataattgtaaaccataaatactcttagtcatgcatagaatatttgctgttctttggaaagaagcatttgagttcatagataattcatagagaattttgcttcttttagatggcatctctgtgttcacatattttttactttctttgctttcttgtcttatctacagatattacctctgatttttcttacatttagtatgggccataggtacttagccccatcatatgtattggtcccctgcctctaatccctccaacaacaacaacaacaacaaaatccaatctgcgtaacacctccatataattctttctatgcaccattttttcacacaattccactcttcaaagggcaatagtcttccactgcatatatgttacatacagaataaattcaaatactttgggctgatacccatagatttttgctattttgttcttgctgcccacttttctactattgttttagtctataagcaccaaactaagcactaatttttctcattttctgaagcagaggtggaaacaaaccttgcctgttcatatgcagattatcatgtaggtaattacatgaagattatcatgtagattattacataaagaataattcctctggattcctaccaaaccatgtcaattactggggaggctacaagtgttagagtttgtgtctgaagggccttatgcacaataggaatgatatccttttgtctgggggaaagacttgtcattcaaaataaaggagttctatatctgtacagatagtagatatatgataaacttttccactgtaattctcagaatcaagtgaaatctaccacagttggggagagcagtaaggctattaatgtcacatgaaagttgatgcttagggcttagggatatagtactgggaatatttcagtgaggatgttggaaaccagaaagtattgtctgctatgacaagagtgttgggtatgtgaaagtgtgcctgtactacatatgctcagtttgaacttatttaactgttattaccttgaataatgactcttactttatagcacttgaatacacctttctccatcagatacacgttcttggtctttgactgaagatataaaaatcatataaatgattaaagatataaaaagagataaatagatataaatggtttaagtggctttcttccctgaaaattccttaagggaaggactctgctttctgaagcttttcatctcccattttactacatacatttcctgtacttgcctgtaggtaatagcttgttagtatctattttctgaatatatgttttgaagaaacataatatattctcctcattcccaggggatacttctgaaaaccctctgggatagttacttatcaaatatttattatcaactgtgtacaggcacgattctcttttctatggacatagcagtgaacagatgaagtttttatttgtaatgtaaaatgtcacgtagttttccactcaaagatctttttcaatgtttttctttttcctgattaacttagaaaatgggcaagtcatataggcttactgagtgtatgtgtgtgtgtgtgtgtgcagaatacacaattggaagcacttggtgtcctggaaagtgccaagtacaaaagactcaggtttgattcctactgctccatttactaactaaatagaggaaagttgcctaaaccctcactttttgtttgtttgcctatttttatatgtattttaatgggagtacttttgtacaaatacctcattaaggctaagaacacttatcatatttagactgcaggtttcaaatgttgattctgccacttcacacttactggctgtgtaaccttaggcaagttttatatcccttttgtcctccagttttctcatctgtaaaatacaagtataacatagctcatagggttgttctgaggttcaaacgagttcctgtatgtgaagtactttgaataatacctggcatacagtggtatatgagctaactctcactactgctaccatactacatttcttgcagttttgttggagaaataaatatgatatatatatatatcaaaattctcagcatagcactggatgcatgactgtcatccaataaattgaaattattactgaagcaatcagtcattttttattattctaagagcctcagaagcatcactctagtgaagaatagtagaacaataatgtatgttaaatgaagagaaattttggaagaaagagaggcagcatagccatcttaagaaaagtaatagctatttgtcatatgtagaagttgtcttagtcactattgctcccctggcatactatgatctccactaaacagaagtattacattttgatttattataatttaatataatacacacatccattataatcatagttctaaaattaaaatccaggaacagttacttcttatctaaaccacttagattcaatttaacccttgggatcaagcccagactccccaccctgatatgcataaggcctttcacagtgtgacccacctccacctctctgggctcacttgttgttgatcccgcactgctctacattgcatcccacaccagatcacttttattttttcaattacatcagtgcccagggtccctgtcagtctacgcattctatgtgatacctttcccataatttactcatccaatttaaataccactttctcgtttcccatctggttagctgcttctgctgtaatcccataggctttatacacatctttaagagcatcatttatattaccttaacactttttgtatgtgtttatcacaacatggagagagatcaatgaggatagggactatgcttctacatcactggagcttgacatgtcatgattcttaacatgatagaatatttattgaataaataaatggacaactcagtgaagggagtaaggtaagttttgttatcaccacttcacaggtaagaggggtgaggctttgaaggcccatcagtaattcctactgaaagccaagttaatagcagacctcccatttacacccagcattgtctggaggtctgttaggagacattttctagattcatcttgactactgtggccagtgtggcctggctcattttatttgagtgcaatttctgcctaatgcagtgtatctcaatcctggatgcacattgaattattcatagcagggtgcctgatacttaatgatattaaatgttttttggaaaaggagagaaaaaaacaccgaaactgcctttctttcttaaacttttaattatttaggcctttttggttcttatactaagtttctccaagtttcatcattagtttaagtattttaatctgattttaactgccttactgattccccaagggtttgtttccccttttttcaactaagttaagaacttctagactatatacttaaaattgtagttaattgagatcggccacagttgaatttcttagctatgtaacaggattttcatttgaagctatttattcctgacaatctctactcttaaagtgtggagttctcttaaaggggctgtttttcagtgaaaatttccagatactcctcaaatgtgtttcaacattagccaggaatcaggaggaaatagagctcctgggatgctattatttcaaacccaggtagatgctccaagtttttcccagtggtctcagtaaaagtaggctgtctatctactaccgtgttgctccctttgagctcccaaactcagctgttggtccattgaattataccgtaactaggcacgattatgtcactgcatggcttaaaatcctccaatggctcctcacagcttttaaactaatattgactaattacctttcatgcaaaccctacagtgtctgtgttaaaccacatatacctacagatatccacataatatccttcctttcaatccatctgatctacttgcagggtcccagaagcgtaattcttttccttcatgcttgtgctttactcctactagaatgctttttttccctcttattactttgcctagatctctgctattcattttttaaaacttaagttcaagtgtcaccaaaggggcaccttgaccgacaccactcaaccctcatccaagtggatactaactcctctttctcttttttcccaaggcatgaagggcccttctctgctggcattcacactgtactgtgctgaattattgaccagattttagctctttgtaagacaagcacctttcctcatttggctttctacttccagcactcggtgcaatgcttattacatgccaggcactgtcctaactgatgggggttaatgaatggtacaatctaccaagattcaacccaaagtcatcaacatttcttagatcctttcttctccaagttctgatatctaaacactaaattagtgattcataaaatgtttaaataatttgaataatttaaaaaatttaatcttaaataatttaatcttgaacaatttgaaaaaattttggactctctagggaaaaatatacaattcctatgtattttatatatgatttatgagactttataaatatactaatatgaattcagtctcctggttgaattcatattgtttttaactggcaggcactgtaatggacacaggacatataatgaccaataaggcaatatcattgctttcggcgaatttcccatataggcaaaaaattacacatgatcaaataactgcaatgcaatatgacaaatgtgataatcaaaggaggaatatgtcaactcttaaaagttttcacagatgtagccattgagctaatcttaaaggggcaaaagatgtaggagaatataaaagtttaaagaacccctatggaagaaaaatcccaaaacaaagtatttataattttaataacaataataataacatctatacttactctatgctacacgttactctaattgattttacatacattaattcagttaatgctaaaaacaatcccttgtagtaagtactattacctattggtttcttagggcttccataatacagtgcaagcataactctaagatatggaaggtttggcttcggaccaccacaataaaacaaacattctaataaagttagtcacattaatattttgatttcacagtgcatataaaaagttatatttacactatattgtagtatatttatggtgcagtaacattatgcctaagaataaaatgtacataccttatgttaaaaatactttatgctgaaaaatgctaagaatattctgaaccttcagcaagttgtgatcttttttctggtaggtcagacctctggtaggtctagcaggttgatggttgctgactgatcagggtgatggctgctgaagtttggagtggatgcaacaatttcttaaaacaagaaaaaaatagagtttgctacattgattgactcttcctttcaaaaaatatattcatgtagcatgtgatgctgtttgatagcattttgcctacagtagaacttcttgcaaatatggagtcaatcctctcaaaccctactggtactttattagataagtttatagaatattctaagtactttgttgtcagttcaacagtgttgacagcatcttcaccagaaataagtttcatctcaagaaactattttctttgctcatccataagatgcaacccctcattcgttcaaattttattatgggattgaataatttgtttccatcttcagggtctacttgtactccagttctggtgcaatttcccccacatctgcagtaactttctccactgaagtcttgaaccccctcaaagtcatccatgtggtttggattcaccttcttccacactctatgaatgttgatattttggccacctcccatgaaaattaatgttcttaattgtatctaaatagttaatcccttccaaaaggttttctattcattttgctcaaattcatcagaggaatcactgtatgtcggctatacccttatagcatgtatttcttaaataataacaattgaaagtcaaaattactccttaatccatgggctgctgaatggatgttgtgtaggcaggaatgaaagcaatattcatctccttgtgtatctccatcagagctcttgggtgaccttgtcaatgtgcagtaatattttgaatgaaatctttttttttttttgaaggagtgggtctcaacagtggacttgaaatattcagtaaatcatggtataaacagatgtgctgtcacctaaacattgttctatttacagagcacaggcagggtagatttagtgtttttgatggcctttggacttttggaatggcttcaactgaataagcactggcttcaacttaaactaaccagctgcattagctcctaacaagagagttagcccatcctttgaagctttaaagccaggcattgagttctttctagctaagaaagtcctagatggcatcttccaatagaaggcaatttgtctaccttgaaatttgtttgtttagtgtaatggctttcatctcttatcttaacaagatcttctggttaattttctgcagcttttccatcagaacttattgcttcacctggcacttttattttatgaagatgggctcttttcttaaaactcttgaacaactgccagattcaaactttccttcttcaacttcctcactgctctcaggactcataaaattgaagagagctggggccttgctctggattaggctttagcttaagggaagtttgtagctggtttgatcttctatccaaaccactaaaactttcttcatatcggcaataaggctgtttcactttcttatcatttatgtgttcactggagtagcacttttaatttccttcaagaatttttctgttgcatttacaccttgactgtatttcacataaaaggcctagctatgttggctttggacatgctttcctcattattattcttacctctaatatttatctaatattattcctacctctaggtaattattcctacctcttgatttaaagtgactcttcctttcaattgaacatttataggccattgtagggttattaattgacctaatttcaatattgctatgtgtcagagaatagggaggcctgaagagagggaggaggactgttggtgatgggggcgtgagggaaggaggatggctggcaggtggagcagtcagaacatacacaaaacttcaccatcttatatggatgtggtttgtggcaacccaaaacaattacaagagtgacatcaaaaatcactgatcacagatcataataagagatttagtaatattgaaaaagtttgaaatattgtgagaattatcagactgtgagagagacatgacacgaacacatgctgttggaaaaatgtcactgacagacttctgcaattggggctgccacaaaccttcaattcgtaaacaatgtaatatccacataaagcaataaattgaattgcaataaaatgtggtatacctgttccacagactgggtagcttaaacaacataatttttttttctcacaattctggaaaattaaagtctgagatcaaagtgtcaccagggttggtttcttttaaggcttcttcccttgacttgtaaatggccatctttttcctatgtcttcacatagtctcctctccatccctgcccatgctcaaatttcctcttcttctaaggacttccttcatattggattctggcctactaatgtcttcatttcaacttaattatctctttaaagatcttatctccaaataaagtaacattctgaagtattaagagttaggacttaaaaatttgaattttacagagacacagtttagctcataatatgttataatccccacttcactgaaaagaagagtggagcacatgaagttaagtagcttgccccagtttgcagaattgttaagtatcacaatcatctagctccagaatctgtgaggctaacctttagattgtatgattctctttttatattttaaaataagaaataaaattcatagacctattgaattaattttaggacaactcttttatttgtggtacaccataattcacaaatagcaaaaatttgcctatgtctataccataggcataccaatttcttgaaagaaaagcagggtctagtctggttagtacttggatgagagaccaaatagcaaatacttaaaatgtcttttctaaggaaattaaattggctcctatattaagctgtagaactaatggcttctgctctgtgcaagtataatggccacaactaacctcactgcatgttaagtactgcccttagagtacctgatctcatttatgtcttacagctctttaaagtttgttattatccacattttacagatgaataaactgagacttccagagattatcttctctctcctcacaaaaatcaataacaggaatttgaaacaagttttcttatgaggaggttttgtatttctgacttctcttcttgctgccacatcccaaggccaaagttaggatgccttgtataagcctttgtgcttgtggaaattggactttcccctcttttgtgttcatctggcaggttcttcctacgttcataacaagatatattgtacggctttccccaattcccctcactttcactgcctgttgtcaatgtgagctgtttaggtccctttcagcactcttaaagtcacctcccaagtactctgtggccctcctcaggagggtattctaagttagtcatcatagatacatctaagtccagatccagaatctcatgttcatggcatcctctttgacctacttagctgttgccgcctcataccctactaagccagtgatggtctttggctcctcatagcctgtgaataaaaaagggtttaaattctacagggataaatcatatgtctttagactactgttattagtgtttcacaactgtgccgtcaccctttcttacatactctgagagattttgtaatcaaattctgtcacgtaaggtgaaatcagaagatgcctagttctcacttctgtgtatagctttgaaaggcctgctaatgcttggaacaaaacatgaaagccttgtccacctttctgttttaattcctaattactaatttcttgcatgttagtggaaaagcattaaacttggaacagagcaccttgattctggtcctagctctgccacctgggtgttataataaaagtcacaggaatctaaaatggaaccccagatcttctactgctttctagttgagttactattggcaaattcttaaattctttgactcaattttttcttctgtaaaatggaatcaataaaatattaagcaagatattgttcaaaggaaaactttagccaaattaaatttaaaagagtttaattgagcaaagaacaatttatgaaccaggtagcttcctcagctagagtaggctcagattctctagcacagccacatggtggaagaagattaatgtacagaaaaagaaaaataacgttaaaaaaatggaagtgaggtacagaaacagtcagattggttatagcttggtgtttgacttatttgaacatggtttgaacagctggccacctttgattagacaaaactcggtgattggcacaagaatagactatagtctgtttacaactccatttaggttatagttcacaatgtacagagaaaccttcaggctgaacttaaaatatgtaggagacaactttcagctaaagttgatttaacaatatattaagagtttattttatagacattgctttattgctaactttgtcatctgggttagattataaactcaagattattgggtagatagttggcacctaatctgtgtgcaaggcactgagaaacaaaagataaaaagctgttgttcttcagctggttggcagcattgatattcctccaatgtacttgtgcctgctttgaaaacaacaatgcctctgcctctatttggatttgttccctcacagtgaaagaaaaaagagtgattgtgatcctgaatttctgaaataaggagcatgtttaactgacaatctagcatctgttttctgtacctttcccacccagttgacaaattctcctccatctgcatcgcttaaaacttagtcagaaagtaacagaaacctcctcatggagagaaaggaaggaaagaacagaaacctagatagggaacactaaagtgtcagagaaagaagcagaagaactgggttctcatcttaactcagtcccttaccaactttgttcactactttctctctctctgcctttttttttaaagtatgatttcacattatctccttcgttgtatttcttatgctaatacatatcctttcctgatcttgtaatgtattcattgctgcttcttgagtataaagtgtgtgagtcctgagtcctctgagaaaaggaacacttaaggtgtttaatgctaattaatgcaggtgtctgttggataaacagcttacatttcaagatgaaggtcaagcagagcgtcttccaagagagaaaatctacacatcagactttggtagaagcatatgcatacttgcaactgcagaaacacccctgtcatcctgtgtaaacacacagagaacagggtacttactattattagtaacagagtggtagccaagaccccttgattccaatgttggttgtaccgttaactgtgacctttggattcaaattttattttgcctctgtaaaatgaggggtttggaagggaagaaaacaaattactgctttttcagaactaagccaatcatttatattgtctcattttatccttaactattgttacttgacatttcacttccttattttatttttgttctcataaatacattaaaatagatagtaccatcccttttctataaatgagcacactgaggcttagagagttttattggattaagtttaaatggaaatgtttattatcatttaaaaattacaagtttgttttaacaagtaactgcttcaaaacaagtactacatgaaaaaaataaataataataaaagaaaaaaaatttaggaatgcactggccttgctattatacaactgcaattcaataaattttgagtgactagaaattcgtgtggctggaggcatcgcaagctgcagttctcaaagagagtgtgattgtcacgtcatctgtcctggcctttcagaaagatgatatccaagaaaaataactccagattctcttgtattttcattatctcattattcccatggcttcagttatcagctagaggttggtgagctgacttctcaatttgtgtttccaaagttaatcttactctgaaatccagacccagatatctagcgaatgacctgacatccccactgaaatgtctcaaaaacatcttacagcacatctcatctagaatcatgacatcagcatcctcccctaatattccacttcttcaggggtttctgcatctggtaatacaaacactttgctcagtagcataagccagaaaagtaggcattttctgtggtacctggcccctcagttgtactgcttggatttccagacatcatctattttcctggacatcattttctcactgatttctttatccccctgatgcgtgcatatccaccaactcctactcttcctcagtcccttctctgcaacgaaatctgtgtggtcttttacaaatgataatctgttcgtgttatcattcaccttcccagatacaaacagtgactttctgttaggaaaaaaacacaaatctccctaacatggcctctgctacccttcatgatttggcctcagttcaccttcctagcctcatctggagctatttgctccttgatccctatagacatattggtcaatttttaattccttgaatttgtcgcatacttccaatcaaagattctttccaaattccattctgtccttcagaaatattcttctaccatttctctaaacagtcattcttcaactcttgaagaatgcaccatcaaagacttttcctcaggccacagaccagatgaggcttccccattaaatcctgttaccatgttacattcttccatatttgccagtccataactataggttgatttctgaaattgctagttactgtctatctccaccactagactccaaatactatagggcagaaaacttcaccaatgctgggcccagagccagtttattatagatatttagaatatattcattcattttttaaatatatgaatgaataaataaataaaaaggtcttctattacatatgtgtatgtaagttttttttgtgtgtgctcatggtggtggtagatgtgttacaacgaatcagttcccaaatatccaactatcttaaggcttccttgtttgttctttttttaagtaaatattttataattattttatttgtaaaaatgttgtgaagatagaacggagagttcctacattttccatacccaattcctctattattaacatcttcccttggtatgggacattagtggacattaaagaaccatgttgatataattattatcaaccacagtcaatactttagattacttagtacctaatatcttcttctgctccaggatcccacccaggatactatattacatttaatcattctgtctccttaggttcctcttgcctgtgatagtttttcagactttctttgtttttttgatgaccttcacaacttcgaggagtactgctcaggtattttgtaaaatgtcccacagttgatatttgtctgatttttttctcatgattaaactgggatatgtgttttgggatggacaaccctagaggtaaagcaccattctcttcacatcatatcaaaggtgtagagggactcaaaaatgtaccccaaagtatggtgccttgtgatgctgagtattttgaagtaaaggagattggaaggcctcagaagcaaagtctctggcccctctttctcctgtgaaataaaccatagaaactagactccctcttccccaagatcataaaaactagaacctttcttttccaaaacaagccataaaccctaaaaatattactatcatcttctcccacctttctttgtagcagctggccataaagaaatactctgacctacattatttgatagtaggtcataaaaccttcattgctaaggccctgccctatacgtaggaggagggactgctgcacagagaggtcaagaagaatacaaacagacagggcttactgggttgtttctctcagtctattacattagatcatactcttttgtccaaatttctgcaacactggccataagcataaaatctaagcataaaataaacaattttccctgggtctttggctcttcttttctgaagtctcccatgtcatataaaactttgattaaattattatgcttttctttgttaatctgtcttttgttataggagtgttggccatgacccttatgatgggtagagagcaattatcacacctctatcacccaaaaagggctatgctattaacataacttaccattgtgaatgttaaccttgatcacctggcagaggtagtgttggtcaagtttctcaaactgttaaatgatttcaccatgtttttatactgcactctttgaaaagaagtcactgtgtgcatctcatacttagtgagtggggagttatatatagtaccttcaagacagagtatctacataattatttgaattcttttacatgatagattcatatatttctctccatttattaatttgtatatttatagattatatctgtacagactcctctatatttattttatacaactttattttgtggctcaaactcttccagctttagcctttaggagtgatttcagttgactactctgttcctttgaaatatctctaacattgtgggtggttgtcgtttctttgaacatatccttagtttatggcactaaaagatgctcaacattcatcttgtatatttcttaccccagccctagaacctgccgtttcttcgaggaaccccagttccctttactggagaatatttcttctgttctgcctactttttcttcttctggcattccaattatgcatatgttacattttttggaaattatcccataattcttaattattttttattctttctctttacatttcagtttgggaagtttctcctaacctagcctcaagctcactgattcttttcttggccatatcaatgttagtgatatatacaacactgttggagtgtttttgatttctaggctttctttcaattttttcttagggtttccgtctttctgcttacattattcatgattttctgcatattatttactttttctattagaaatgttattctattaattttatattatgtatagttttttaaaattgatattattcacaattatttcagattctatgtctcatagttccaaaatttatatcatatctaatatgatataaatgattctaatgattgctttatctcttcagattttttttcttctctgttgccatgacttgtaattttttattaaaagccatatgttttattaggtaagataaactgaggtaaatgggcttttagtgtacaaatttatgttactttggcaaggagttgcacaatgtttaaatgtttgtcctagttgttacagttttgagatgagaggcctcaagtttctctagtgtatttgtttttgtctctattcttggttttgggtttccctacatactcttcctcagagatagttcatgtatttcagctcttttagctgtaatccactgttgttatactggagatttgttggatgctggtaaagtatgagagaggggagtgttcaaaatattctaattaaatcttagtcctttagtaggccagtgcattggggcttcacaatacagctttttcttcttttgcctctgcccctctatttgcttccctggttgcagtatttctatttatttccttgaaactctgacccctgtggcttatatttacttccccttaggtgagacaggaagactgaaagaggctggactgaaaggaattctcttcctgaaactgggataaggctctaacaatttcccctggatcatagggctttgatatggagaatgtcctgggcatatttcacaacggtcactctcctcctccctgtaacagagtaaggagagtatctttctgaggtcttcaccataaaaacctggtggagttcctggaggtaaagccccaaacatgtggaagttcccctaagacagcagcacccaggaatttcccactatcttcactagtctagactcagtctccagccattcatcgaagtgtttcagtgttcctaccactttaggaatccagctgctcctgcccctggtaagcagatctcagctatgtacctctggatgaacccatctctccacttttgaggatggcagtttgccccgcaacttcaattctctcatgggtccaagaaaatttgttgattattaatttgtctattttgttcttattttaaggataagggtgaccagagtctttacatgtctgacctgaaatcagaggtcccatgccagcttttatttataaaacacatctttccatatttccatctgtgttcatctttacatttttctaatttttctgttgtgaatttcactgtcactcagattttcagaaaaactatctagattcagttcaaattaagttttgctaaaaagatgactaccccctcctccccaaatgtcaatgtaattatctgagttaaacattaatattcccatgtgagctattctagtcatggtttggtgaaattaactgaagttgagaatcactggtgaagaacttaatcaagattaataccttcatttgaaaaggttgatgaggtgggtgagcacattaatggtttcatccattaaatcttttggtgctgagaattgatgtccttgtcctacttaggtaaagaatttttatttcatggcagaaacaagattatttataaattgaactatagaagtaatttttctcgattgacaaaaggtacaatttttgcctccagcccttatttagtggctcactgtatatcaggctgttcccaaatcagtcaaaatttgacaggggtggtggagggattatcagacagcctccttctcattttaaaaatttaatttaccaattgaaaacacatggttagtacgaataaaatgtctactaaaaattatctataatgtgatttccttttttggtaaaatacaggtagagtgttgtggatgcatattttaaaaactagatataacaaaagcatagagcaattacaggtgattttttcttttctcctttttctttgtattttctctattttacataacaaacaagtactgcttttgtagagaagaaaaccataaaagttaaaacaaaaggactagtttataaaatcataggactttaataaaatttggggtttattgtcaagccagtttctaatttcttctgttgaggaaactgaagcacagaaaaactcatcttcttaaatcttctaatttctcatttttgcctatcagaatactaaccatcactaaaggcactgctcacatatgcaaggctttggcatttctaaaacagcatatgttatgtctcatcaattttaaagtttttccagtatagtcataatacttaggagggggaagaagagaagagaggagctgtgagaaagataatagcttttatgtaccacttaactgtgtattttgtgttattttaattaatccttacattaccttcatgacataaatataattcccattttgtagaataaagaagatcaaacagatacaattttacaaatcttccctgtctcaacctatagaactcagatttttacacagttctttgtgtaacttgacctacagtagatactcagtaaatattcgtttaataattgaactaatttagaaagcatttggtatgcatggaccagatttttagtgtttatcagtggactgccaattcctcactaaattcacaactgaaaaccaactttgaccacaagtagtgtgttcaagttcagatcctctaataaacagaattgttttctgtcatggaaaaaatgatcaccatttcttccatttggcttccttgttctcttcattattgtgcttcaaaatgttgaaaatggttttctaaaattgtattcattttgtttgaagcattatcacttctttttcaataccaccttttctaccatgtaccaacctttgacctgctagcttaaaatgtacagctaagtaacgatagcttattatttagtactttcacaaaaactatcatattggaaacaggtaggacagatattattactcttatttaaggatgaggaggctaattctccaagttcagtgattttcttagagttatacagccagatgaaaacacagagctaggcctcaagaagagttccccaactccagctcttgtgttctttcttctatgtcatatgactcgataatgcaaagccattctctttgtcatattgttaatggctctctataaattactctacaacttgagtttctactccattcttactggacttttttcaatcctttaattttttagtttttttccagtcaaagtttttagttgcatgaaatagaaactaactctgcctgatttaagtaggaaaagaatttgctgagaggctattgagtagctcacaaaatcatggagcagcaggctcagaaacaggtgagaataagcaagaaggncatcagctaagacagctgccaaaaccatgctatagaacacagggcacttgctgggcaatggattcctttgctggtacatctggctttgctgaccctgaaaactgaatattgttataccaactgccactgcccatttctaggatggtttctgattatccctgcttctttgtgtcactatctcctgtttcgaagtcatgaatgagtatgtcagattggcagaatatttatcatatggtcatactctaactttagaaaaagccgagaaacaaagtttaagtatctaaaccattgtcattggaggtaagctctgtctcccatcaagactcattaagcccacacttcacctatcacaacatgaatgtttaaatcattgaaagcctcccaccagaaccaaaaaaatgaccaaattctagcactgtttccaatttagttttatacgttctttctctggtctttctttgggaatatatttaatttacaactatgactcaattgtcactcaaccaatagttacctttattttgcagcattctggaggttcaaaactcaatgtgtaagttttattcacctgctaagaaattattttttcaaagctagcctcaatatttattttaaatgagtgaacttcaaggcctgaaagaataaactaatactttacgaaatatttttgaagtataaagaatatattcaacatctttccatgtctccagattttaatatatgccttattttactttaaaaattttcaaatgtttcttttatacacaatatgtttcttagtctgaataaccttttcctctgcagtatttttgagcagtggctccnaaggcaccgtcctcttcaagaagtttatccagaagccaatgcacccattggacatnnnaaccgggaatcctacatggttccttttataccactgtacagaaatggtgatttctttatttcatccaaagatctgggctatgactatagctatctacaagattcaggtaaagtttactttctttcagaggaattgctgaatctagtgttaccaatttattttgagataacacaaaactttatgcttcgacaatgttattcctgaacactttaaatcctgaaagtgcattataatccttaatttattaccagtttattatcacaggaatcaaattctgaggatctttaaagtcatggtcattttgcttaacataggccattttgtacatggcaaccatgtgaagagcagtagaatcagaagaagaaaaaaaaaggttttgagacatgactctatcaactgactgtaaggtgacctgggaaattcnctctacatccctgaatctcagtttattcacctgaaatactgggaccagaacacattaaagaattatttagaatgatacattaatgagcctagtacagtgtaacacagggtaaacatccagcagttttggaatcatttttggaagtttcttgctagggttaccaagaaaatttgtagaaatcttgaacttaagtgtagttaataataatagctattataatgtttattgctctatgatgacgatagtaatataaaaccccaggattagaattagatttgagctctaaataatcttcctgcatagaaccatgtcagtatcttcttgacaaaatgaggaacagatagtagtgtttccttctacctgaaagtccactacatgcatattctttacatgtattattaataaaccatataggaggtaagttttattctcctaagataaaggtgaggacactgatacccagagaatttaagtgactttctcaaaatcaaacaccaataatgtggagaagcaagatttcaattctaggaggtcctcctcatctcaccgcactgtaattcacctaacgcatgagggttaattatcaaaaacagtgtggcttatgggtaggaggtatttaacaagcattgatgtttcattgcattcattgataatgacacataaatacataaataaataaatatataaaataaacgaatgaaactcaaccctctcactcttgtgctcaaatccagtgatacatgactagcatagtttcatacctgaagaagctccagtgtggaagtaagacaattgtgcaaggaagtaaaaaacatcaggctgtgttatgtgcagtaaaagagtcataaagaaaatcccacagcagtgctgaagagaaagccatgacttttgaagggttcaacctaaaaagagaaaacaaggccttgagaatgaataagcaggtggcagatagaaaagggcaggggatatgctaggcaaagagaatagcaagaacagtagaggtggaaaatgtacagcatatttatgaaatgctgaattattctatttgagtagtatgaacagtggaaaaggacacgaagaaaataagttgacccagtttataatagttcacacatactaagtattttttattagccaggaactcttctcaatgtgccctatgcattacttccttaaatcttcataattactctatgaagtaggtatcattatttcttttgctttttcatagatgaggaaacagagtcataaagagtataaattgattttcccaggccacttacctagtatatggtacaatatatacacaatttggggctaacaggagaggctataggtcatcaaccttgttctgccctttgagggatgattaattgaaaagatatgggtttaattgaacttttctgctttatctgaagactgtagccaatgcacaaaatgctaacacagctgacaaaggagatcagtttttggaaaatcttaagatcactaagaacagagaaatttgcaaagggtggaggtgtggtaagaggaggggtttcctgtaagtctcaagtgacatgtcttctctttcttctatgaaaaccacagtacataaaaaagggagcttattggtaactatttttcaaagattttccatttaggattttatgatttagtgtctgtttccatttccaaaacacgctagactttcatgggttcatgcttttaaatatgctattgtttctgcctgaattctgactctctttctccatttgtcaaactctcagatataaaaatcattttatacttatagtgatgtttactcacgcctttctcatagttacatagcatttctttctgtgtatgaatctgtcctgggttttattcttccccaaacccccaagatcagaatttatcttgcaagcttctccattctaagcatcacattgtatctggtatggactgaaatcaataaatcagtttgagtacaagtgatatttatcatgaagtgtcatttctcttaactaatataagtgaagttttctagaaaaatgccacacctcttaatactctggtcacttttggatatatattttaaaacactataagtattctatcacaccaggtttttttttatgtgtctgtactgagttgtttattctttacatacacatttattgaatacgtactttgaataacacattgccttagatactatggatacaatggtaaacaacatagtctctatcttcacaaagtttaccatggaagagaaagatcttaactgcttgctgaaaaactcatttatatagagatatgcctaactccaggggtcaatgaagtgatacttcagatgacatcaatatgacaggtagaattaactagttgaaaaggaggacatggttatgaatttgggccatattgttagaataatgcaagccactgataaattttaagcaggttataatcaaatttgaattttcaaaagattattgcagcttcagtatgcagaaaaattttagtagttggaaagcacatgcagaaagccagtgaaaatgctattataagagtctgaggaagaggtaaaggtagtttaagttgcagtggtggtggcaggaagggagacagaaagcatgattaatttgatattattttgaaggcaaaatttacagaacttggaaaattatttatatatcagatgaaggagattaggaatggctttacgctttctggcctgtgaaaatgatgaatggtagtataattcactcatataataacaagaggagcaaagaaagacatggaggaaagcttatggttttgttatacagtgaaatgaagttatatgggacggcaaggtgaatgtctcttgagaagttggatacacagcctgaaactcaaaagcggtgtctggccctcagatcctaatgcgagagacatcagcatataaattattgactcagctaatttttaaaaccccatggaagggtgatttttattctgttttacaggtaagtaaattgagactcagaaagataaagtgattaattttaaactacaaagctagtaagtgtcaaatactgaatccaaaacttcatcactccatcactgcacagagaagagggttccctttaacccctacattgtcttctacgcatatgctccacctctttgttccttccctagtgtcccaatggatactttttactacaaaggcaacaaaatttcctggatgagccaggggagaagaggctcaatgagtcatattagaagcttgaaggtatttatttccaattaaatttaaagaaacaatttacttgaaatgctttagagtaattttcacacggctttgaatttacaaagttaattttagagaagtttgactttaaaataagcaacagcagatacttgggaggctgaggcaggaggttctcttaagcccaggagtgtgaggccagtttgggcaacacagcaagactcatctctaagaacaaagcaaaacaaaacagctaaactaagtaacaccaattgcctattttctattttatgaatttttccatattgttgcctctgttgtactttcaaggagtttaaaatttatctctattcatagctaaattttaagcttactaaaaaattatttaagatttcttgatataattttgttcaaggggattattattcatcaaccaggtactcatgtttataattacttaagtggtttctgtaaaaaggcagctgatgtctgccatttatcaaactttttctcttataattgaatttagtgattctttagaaaattgagtagcaggtgattttctcatatgtataactaatttacaaggggaggccaaaaatctttggcaaagaagggttatgtcttcaatgttgttgataaatgtaatcttactttctacgtagcagaaaaactctgttgagagcttccttctccccatacattacaaaagacctggaaatttggtttcaaaaatgagaaggggaaacactgttcacagtaactgcagtgccccattctgccaatggaatttgatgacacttctatcattcatgaatttgttcaatagctctgtttggctgtgtatacctgtgtgcatgctgttcttttctgcctaggatggattgccatcaacattatatgctcagagtctaattcattcttttactcagtgggacagtcttctggggtgcattccctgacttcacagagatgtaggaagtcttttctccatgatgcctttctatcttcatcagaacaacattactctcgaaatgatttgtttacctgccaggtgctgagggtgaaaaggtaaatgagacagagtgccccccaactccccgcctacaggtagtgtatctcaatgaataagtgatattttaataaatgagttgaagaaagataaaacaagtaagacataatacttgctcttgagagtttgtgacaagcttgaaaaataagacatatataaatagatataattataataaatggacgtttgtgccaaatgtcacaaggcagcaaagaaactagtttgagaatccagaagagaatggagctgagtcagcagctgaagcaagtttggaaagaaaaactcaaattgtaagctgatttaggtgaaatattgatgaaattatcattctatcatgataagaatcaacagcagttgtaaattgttttctatatggtagacattgtaccaagggctatacatacattgtctagtttaatcgctccaggcagactcctaattcatttgagtaatggcccctaactacttcatgtgtttgttttgtgaataaatgggcatgttaatgcactttggaaatgatagagcataaaacaaaaatctacataattattctgaaaagaatggatgacaagaaaaataggacttcacagagggaaggatgatcaaaaaattacgatattgggacagaacaaaaaggtgcactattggggctcaaacgcagatggcttacaaagaaagtctgaatttgaaggatgttgagaaataaaagtatctcaaagacagtcccttggtgacagtaaaaattgagaccacttggaatgaattaaagtggagcaatagtaagagaagctggagaacaggactgacatagaaatagtatttaaaagctgtgaaagcacttcagccaagcctttaacaaaaaagaaaatatttattatgtagcctctatgtatcctgcctttttttggacattttaaatgtactatgtattgaagccactaacagcaatttaagctaagtattgtagtcccattttcaaaataattttaatatatattaaaaacagtaactttcaaggtctagggtttaccctgggttatatagtccatgatggctcaccaacaacctgtctgtattctagctagtcagaaaggaaaaggtaaatggttaaagatatattcttttctttttaagggaacttcccccaaagttatacatatatttttgctctagacttgagtcacatagccatgacttgctgcaaggtaagcccaggatgcactctcttctttctgctatgtcaaaaagtaaatttatagtatcttctgtgtatgttctacatatatatcttctatatgcattatagagagcatcttctataaaggaattgttttgttagaaagaatccatttgctcttactgaacagatattcagtacggacttcctcatttactcaaatcttaatagtctcctaaatagattctatagttatatttacataaaatttaaacatctctccttaactgctacgtgccttaaatatgtagttgattgtgagaatgagatttgtttttcattaaaacaaatctttccttcccatttccacagctgccattcagggacattccttcaacatatcttctgggtccaataacacattcagtcattcagtaaacatgttcattctctcatatgtgtttcagacactgtaccagattctagaattatatcaatgatgaaagcacactattggccttcaaggagccattttaatagaaacaataggttaattgttgatgtatagggaagtttaatttatgtaatacttatctagccgtattttatttttttactatgcattatctgattatggatttcctaaatatatagttatatcatctattaattgcatcaggtacttttagtagcatgctttctaattgtatcagtaaaaagactttttttttattttggaaaattaatagaataaaccaaaaataaaaatcaactgtaatcttattgttagattgatcacttgtgctgttttagtctcctgtgtactttttcttatacttttttccacatacacataagttgttaagcatatcttttaattaattttgttttatcaaatattataagcatgttattttacaagccaaagagtgctgcaagtcttataacaaaatgtttatgcccctatatcagctactgtaacccttttacctatttattctgctatattgccctgtatttctaaataatagggaaatattactatctgttaattcatcaagtttatctttggagttcctcatatttaaataatgattttaactctcttacagcttccctgttctttcattcatcttctcagtatagtattatcatatttgggggcaaatccacatctaggaattttactgtttttactactacaatattatttacagttcaaccaaatagtatgctatgattacgtttgttttcctgcattacttttctattggaattaagactttttttttcattttaaagcacccatcactgtttataccaaattttaaaaggaactgtaaatactacctcataacatagtgaaatatgagtaatttataaattttttccctgggtgacatccttttgtatatgtctgcccttctcattccacagctgccattcagggacattccttcaccatatcttctgggtccaataacacattcagtcattcagtaaacatgtttattctctcatatgtgtttcagacactataccagattctagaattatatcaatgatgacaatatactattggccttcaatgagtcattttaatagaaaaaatattcatataatagataactggaatataatgtgacgggtatgataatagaggaaatgctaagccagtaacatattggatgctgtctctcctcagtgccatgttcttatgtggtttgaaggaatataaataatcaggaggctaaagacttttccttgttcagaattattgtttaaatatatgtggtcaaaatctgttgttgctttttaaagtaatgtaaaacgattgaccactattcacctttatttacaataaaggaatcaatatacaattggataacattctgattactaccaagttattgttttccctggtttctgctgaaccagaaaatcgaatattgaaaagactgagtctacctgtaaggaatgagttaaggtaaagaaaaaatatgcaagtcaatacattacaaaagttgttcatccatttatggcagcagattctaaactgccaaatctccaaccatctgattgggttcctaaagccaagtcttagacatcccatgaatcattaccttttagtcagtatagcacagggatttcaactttttgtaaaggaatggcctgctagaggaatcgttaaatgtccattaaattaagtcttgtttagataattaaaacacagcaggatctgtctagttccctcatctggttggggaggttgttggtagtaataaaattattccttttaggaattttacaaactgttcatttatatgactaaaggtgtagatagggattcttatatggctactattaaatgatacatttaaattgtccaactaattatagaatcatctgttttatttgaaatgtatggcttcaggaaaattttgaatttaatttgatgtgatttatttcttaggttgctcagtatgatggcatctcaaaaacatgggcttacccatgatttttgtttggtgaatgtttaaaaacaacacaaaaagccatttatgtacacattttatgcatacacacacacacacacacacacacacacacacacaacccagaatggtccttaggataaacgcaagttctgattgagtaatgactatggaaattttccccgacatttagaaatgctgttctctaatgcagaggaaataatacatcattttatgaatacgttcatagaagaataagatatcaaatgttcttttatgataaaggaagcaactacagaaagcttttatttgttcaaagtaacaagtggtattgatgaaaaaaaaacacacacaccaaaaaaacccaactctcccaatactacttttaaaatgaacatatcaaaactgattttcattagaatgtagttatttttccacactagttaattaaaagccaagacccagatatatatatcacaatgcaaacaattaagcttcatcatctggacaagaatgccaacttagtctctctttgtaaaaaacaattacaatttcaagacacttcatatttgccgcttttgccagcagcaagtcggcctgatgtgaatattcccatttcaggagaaacatccattctccactgctgcctgtggcaccaattattctttcaggatcaagatctctggtgaagcctcttggtttgtcggcagcatctcttttctttgatttgctgtcattagattcattgtcagataaagactttctttctttttgtaatttttttttaccaggttttttagaattaaggaatgtttcaattaactctggacaatctaaattttctgcgggttcccaagtactgtcaacatctgacgtcccttaaacttcaggaaatgctccaccttcccttttgctgtaattcgatccagtagtttttccacaaatgcttcaggctctgcctcttcgacttttttacccttttcattctgttttcttttttcctccctttttaaaattatttattattttttgcactgtagtttcatttcaggcttttggggtttttttgtttgtttgttttggttgttgttgtttgattttggcagacccgaagggctattattcttacatatatcggctcccctaagccccgcccctccaggctttactttcagagtcctgaggcctataaaggccaggcccctgccctccagcagggagtgcgtctctgaggagaaacaaaggcccagagtgcggacgctccagggtaccgcggcacagggcccactcctatgccactgcggcccggtaaccaagagcgcccccaacccccgaagccttaggacagagggacggtgcccatgcgccaaaatctgtttcaagatttaagactgtgacctctgtgaatacagagattgttcaaatgccctagggttcttgggaggctactaagattgctgagcatttgccaacattactattaatgtctgtcaaataattaaaagactggattagtgaatggttaatgatataacggtgttctattgataatcggaatagttacaacatcctttcacagaaaaagatggaaaaatcacagctaacatttaattgagtacacactatataccaggccctgaatcacttacggatgttatctataaaattcaaacgttccaacaagaggggtattattttcccatttttctgatgaagaaactgaggctttggagtattaggtgtaactttcccaagctcttacagttaataagtagtagagctggccttcaaacccaggtgtctactccaaaggactgtgaaaggatgaagatgatggtgatcgtaacaatggtggtaacaataaaaacaatgggatgtctttttatttcagacccagactcttttcaagactacattaagtcctatttggaacaagcragtcggatctggtcatggctccttggggcggcsatggtaggggccgtcctcactgccctgctggcagggcytgtgagcttgctgtgnnntcnnngtcacaagagaaagcagcttcctgaagaaaagcagccactcctcatggagaaagaggattaccacagcttgtatcagagccatttataaaaggcttaggcaatagagtagggccaaaaagcctgacctcactctaactcaaagtaatgtccaggttcccagagaatatctgctgrtatttttctgtaaagaccatttgcaaaattgtaacctaatacaaagtntagccttcttccaactcaggtagaacacacctgtctttgtcttgctgttttcactcagcccttttaacattttcccctaagcccatatgtctaaggaaaggaygctatttggtaatgaggaactgttayttgtatgtgaattaaagtgctcttattttaaaaaattgaaataattttgatttttgccttctgattatttaaagatctatatatgttttattggccccttctttattttaataaaacagtgagaaatctacattaactgactcctttaggcttcagaaacacatttttattctcttcagaaaggatgatattcccctttattttacatttctgctccaa
